United States Patent Application Publication US 2007/0224595 A1 - sequence listing, part 2

SEQ ID NO: 6545 - DNA, 544 bp, Triticum aestivum
  Clone ID: uC-tsro9316116f12b1
atctttccctcgctgccgctgcgtctcgtctccaccaccccacttgcccccggactcaggaggatcgtcggagatgtcggacaccgatgagcaccacttcgagtccaaggccgactccggcgcctccaagacctacccgcagcaggctggcgccatccgcaagggtggacacatcgtcatcaaggcccgtccctgcaaggttgttgaggtctccacctccaagactgggaagcatggtcacgcaaagtgtcactttgttgccattgacatctttaatggaaagaagcttgaggatatcgttccttcatcccacaactgtgacgtcccccatgttgaccgccaagattatcagctgattgacataactgatgatggatatgtcagccttctcactgagagtggtaacactaaggatgacctgaagcttcccactgatgatgttctgcttggccagatcaagactggatttgctgatggcaaggacctgatcctgtctgtgatgtccgccatgggtgaagaacagatctgcgctgtgaaggaaatc

SEQ ID NO: 6546 - DNA, 540 bp, Triticum aestivum
  unsure (1)..(540): unsure at all n locations
  Clone ID: uC-tsro9316116g08b1
atacttgcgtcgctggtgtatatgccatcggtgatgtggcgactttccccatgaagctgtacgacgagccgaggagagtggagcacgtcgaccatgctcggaaatcagccgagcaggcagtaaaggcgatcaaggccaaggagtccggcgagtccgtggcggagtacgactacctgccctacttctactcgaggtcgttcgacgtcgcgtggcagttctacggcgacaacgttggcgagacggtgctgttcggggacaacgacccagcggcgcctaagcccaagttcggcacctactgggtcaaggacggcaaggtcatcggtgtgttcctagagggtggctccgccgacgagaatcaggccatcgccaaggtcgccagggcccagccgccggtggccgacgtggaggcgctcggcaaggaaggccttgatttcgccaccaagatctgaagattcctcttatctattctacgcgtgtaaattntgtgtttggccctcccctgccgatgcttcctagttcctagttcagaagtgtgattcg

SEQ ID NO: 6547 - DNA, 523 bp, Triticum aestivum
  Clone ID: uC-tsro9316116g09b1
ttttcgcgtgggtgacgttcgcggatagtctggatggccattcccggacaactttgagtctgccacatacagtatacaccaagagaggtttggtgcaaggatgtgcattggggacattccgaagcatcagtcctgtacgtggctctcacacccgtcgaagacccaagacggcgcgagctgagccatctcacagcaagtaaatgaaccattatacaatagttgtttcccctgttgttgttgtatcgtactgcgactgccatctactcaaaataataatcgtagcccatctcagatacacttctgtacgggccgcgattagtccattggattgttgaaatggatgtttaaggggccacagttccctgctaataaattatatgagttcatgtcagccaaccctgttagacaacgctgcctatgtatgtttgctactctgctgctgctgtattagtcctgtaatgtttggccttcatagccccttctaggaagcaattgccagccgccagaaagtgtgtttctcttc

SEQ ID NO: 6548 - DNA, 568 bp, Triticum aestivum
  Clone ID: uC-tsro9316116g12b1
atttttgctctgatcttctctgcactgcttgtgagatgactgttgtctggatacagaatcagctccgaaaaaaccaaacgaaagagctcatcttggattatgcgaatcggctctgtgagcgtcttccgagccccaacggggaatcaaccgtcgactgccaccagatctcagagatgcctgatcttgctttcaccatagcaaacaagactttcaccttgacgccagagcagtacgtagtgaagctggagcaatcaggccaggccatttgcatcagtgggttcatggcgttcgacgtgccgccccctcgtggcccgctctggatacttggagacgtcttcatgggcgcctatcacaccgttttcgacttcggcgagagcaggattgggttcgccaaatccgcatgaggacttggtgtatcagggctcagggccggtattgtacatactgcaagcacgtgcaagttgcaagggcaacaataaacttatacggagtattagtagaaaggaacaaatgaacttgccaccagcatttgtatagctatttgctatgtatggcttgatatggagct

SEQ ID NO: 6549 - DNA, 557 bp, Triticum aestivum
  Clone ID: uC-tsro9316116h05b1
atcattcttgacaccaaagctcatcttcttctccttgaaatctttttgggttcatcagatttggaggatgtcttgcaactgtggatccggttgcagctgcggctcagactgcaagtgcgggaaggtgtaccctgatctgacggagcagggcagtgccgccgcccaggtcgccgccgtggtcgtcctcggcgtggcgcctgagaacaaggcaggtcagttcgaggtggccgccggccagtccggcgagggctgcagctgcggcgacaactgcaagtgcaacccctgcaactgttaagctgcatgcactcgtaccgtcgtacgtacgtgtgatggtgtgagagtatacgtgaataacgagcgtctgatctgatggagtcgagcaagggtgcgtgtgcatgtgcgtgtggtttacttcgctcgctctccgcctatgctctgcccttggtgtccttgtgtgtatgtgtgtgcatgtgtccctgtaattgcttcatctatctccactatggatggagtgatgaatatgtaagaatgaatgatttacctaattaactactcct

SEQ ID NO: 6550 - DNA, 480 bp, Triticum aestivum
  Clone ID: uC-tsro9316117a10b1
cccacgtgtccgtgaggagtgagaagagatggctccggtgaagctgtacggcgcgaccctgtcgtggaacgtcaccaggtgcgtggcggcgctggaggaagccggcgtcgagtacgagctcgtccccatcaacttcggcaccggcgagcacaagggccccgaccacctcgccaggaacccctttggccaggtgccagctttgcaggatggtgacttgtacgtgtacgaatcacgtgctatttgcaagtatgcgtgccgcaagagcaagccagagctgttgaaggagggcgacatcaaggagtcagctatggtggatgtgtggctcgaggtggaggcccatcagtacaccgccgcgctgagccccattctcttcgagtgccttatccatcctatgcttgggggagccactgaccagacggtcatcgatgctaacctatgtaagatcaagaacgtgctggctgtgtacgaggcgcacctgag

SEQ ID NO: 6551 - DNA, 419 bp, Triticum aestivum
  Clone ID: uC-tsro9316117a11b1
ccttctcggaggcgtccatctgcacggcggagggcgcctcgcagttcaagaggatcgccaatttccaggactaccacggcctcccggagttcagacaggcgatggcccagttcatggggcaggtgagggggtggaaggccaggtttgacccggatcgcgtcgtgatgagcggcggcgccaccggcgcgcaggagacgctcgccttctgccttgccaaccccggcgaggccttcctcgtgcccacgccttactacccaggattcgaccgcgactgctgctggaggtcgggagtgaagctgctgccgatcgagtgccacagctacaacgacttcaggatcaccagggaggccgtggtggcggcgtacgagggcgcgcggagcagcggcgtgcgcgtcaagggcattctcatcaccaacccg

SEQ ID NO: 6552 - DNA, 155 bp, Triticum aestivum
  Clone ID: uC-tsro9316117b01b1
tgggatatgattctctgcttgatgcttatcaaatacagagtaaactagtaggtgggaatggctgtaagtgtacattttagaacgcgttggtatagtgctcttaaaaaatggacatatagggccattagcttctcttgtggaggaaatcattgact

SEQ ID NO: 6553 - DNA, 311 bp, Triticum aestivum
  Clone ID: uC-tsro9316117b02b1
tcggaccatatcaaagctgcggcggtgcgcgcataggaggcgaatcagctttggaaccaagccggcgacgccaccatgggtatctcgcgtgacttcatgcacaagcgccgggccaccggtgggaagcagaaggcttggaggaagaagcgaaagtctgagctcggtcgccagtcagccaacacttatctatcaagcaacataacagtgaggagggcccgcgttcgttgaggctacgtgaagtgctgggcctctccgtcttgacagtggaaacttcttatgggggagagaggctgttaccagtaagacccgtc

SEQ ID NO: 6554 - DNA, 438 bp, Triticum aestivum
  Clone ID: uC-tsro9316117b04b1
accaatcttaagcaagcaagaagaggaagcggtcggtggatgagcgtgaggtacatgatgagccgggtgggcgcgcgggcggcgcaggccgcgcgggacgccgtctgcaggtccgccggcaaggccgacagggcgcaggcgcaggcgcatcagcagtccatggccagagccggcagggcgccggcggagtctgcacgggcgaaggcgccgatggccaggaaggccgccgatgagcggcggaggcgggcggcccatgaggagtcgctccgcaccgtcatgttactctccatgtggggccccaacgcctagcagcgcgtggattagtaccgatgattatagttagcagtgtgcgtgcgtgcacatggtttacgtgccgtgtggctaaaagtaacccttttaagtttgtgcaagcctgtgtgcacaaggcggatgtaaaga

SEQ ID NO: 6555 - DNA, 368 bp, Triticum aestivum
  unsure (1)..(368): unsure at all n locations
  Clone ID: uC-tsro9316117b08b1
attatttcattattctgctcgatcagcaggtgcccacgcgacgcgctgaaggtgggcgcgtgtgtcaacgcgctgaacctggtcaaggtccaggtgggcaggccgaccgcgttgccgtgctgcccgctgctggatgggctcgtcgacctggaggcggccctgtgcctctgcacagtgatcaacgccaacgtcctcaacatcgtcaagctcaacctccccatcaacctcagactcatcctcaaccactgcggcaagaaagcgcccaccgggttcatgtgctaagcgatctagncaggcgtgccatgcagcccacgcatgcgttggctgcatgcggccatgctgattagtggtgcgagaagggcattatc

SEQ ID NO: 6556 - DNA, 375 bp, Triticum aestivum
  Clone ID: uC-tsro9316117b12b1
acgtcattaaatacacgaaaaaaaaaaaaaacaaaaaaaaaaaatcaccaaaaatgctgctggcaaacacaaaaaagaaaaaaaacaaaccaacgggcggccatctttgcgcttcccggctttcgttcctttgtttgcaacgcgggggcgcctctttagggggtcccccttttactcccctggccgtggccaccttaccctttttttggggctcccctggtctaacccagggcccgggctttgccaggcatacccttttaaacctcttgatttcccccattttatgccttgcccttcgcccccccttttaacagcttggattatatgaaaaatgggccgcccccttttctttccctttcagtgcacccccctttt

SEQ ID NO: 6557 - DNA, 103 bp, Triticum aestivum
  Clone ID: uC-tsro9316117c06b1
cggacgcttgggcggacgcgtgggcggacgcgtgggcccacgcgttcgggccaatccgcgtgcccggttcgtggtgaccggccacagcctgggcggcgcgctc

SEQ ID NO: 6558 - DNA, 458 bp, Triticum aestivum
  Clone ID: uC-tsro9316117c08b1
gtgtgttagaggcatctattctcacaagatacgcggctgccatggtgagaaccctctttggtttcgtagtcgccgccgcgctcgtcctcgccgtcttcatgccagccttcgccgccgcgcaggcccccgcgccggcgcccaccagcgacgcatcctcggtcgaccaaggcgttgcctactttctgatgatcctggcgctggtgctcacctacctcatccacccgttggacgcctcctccccgtacaagcttttctgagcctgtatatgcgcagaggcttctcattcttttgttcttctttctgttgttcgctgatcgataagctagtggattcttgagagattggttatgtgagattcgatttgaattcattaattcgttgctcttgtactctggtggattcgcacgcatgcgtgcatatttttgttccaatgcttctcaggtctgttgccaggaatt

SEQ ID NO: 6559 - DNA, 432 bp, Triticum aestivum
  Clone ID: uC-tsro9316117d03b1
cccactctttcgcccacgcgtccgcccacgcgtccgcggagagcttcatcttgaaatctgcttgaaggatctgcaggatgacttcatgggtggtgctgaaatcattgtttccccccctgtcgtctccttccgtgagactgttctggagaagtcctgccgtaccgttatgagcaagtcccccaacaagcataaccgtctttacatggaagctcgcccattggaggagggattggctgaggctattgatgatggccgcattggcccgcgtgatgatcctaaggtgcgctccaagatcctgtctgaggagtttggttgggacaaggatctcgccaagaagatttggtgctttggacctgagacgactggccccaacatggttgtggacatgtgtaagggagtgcagtacctgaatgaaatcaaggactctgttgt

SEQ ID NO: 6560 - DNA, 490 bp, Triticum aestivum
  Clone ID: uC-tsro9316117d05b1
cccacttctttcgcaagaatggaaaaatgtctcctggagcacagaatgagatgaatgagcgtgagctgtctgcactgaaagctgtcatcaagtgcatcgaggagcacaaactggaggagcaatatcccgtggatccacttcagaaaagggtgattcagctggagaaggccaaggcagacaagaggagggctgtcgaagccgccaagccacagtcgaagaggccacgtgccaacggatcgctctatgcaccccgtgtcagcagcttccctgagaagagcttctaccaggcaacaccagagaggcacccatacccttacgaaaggcagtttgtgtacggcgctgaggcccaccaccaccctacgatgatgaacgcggctccctacaccatctcacccgcccacacgccgtactacggtaatggctacccggtgcagtaccagataccttatatccactaatgggggagagctacaatggctctttcctaact

SEQ ID NO: 6561 - DNA, 317 bp, Triticum aestivum
  Clone ID: uC-tsro9316117d07b1
aaacgggcgagatccctgattatgcgccggaggagaccatcatgaatacttcaggaccgatgctgctggctgcctcccctgaggtgttctggtccgaacaaggtggagtcactgggcgcccttcggccccagttgcttctgtgagggggagtatcatgaaaaagatgcagtgatggcacttctgctctctgtgggaacacaagtaccccgcggtttcatggtcccagacacaatacgaacactggctctccgtgagacagatcagagaggggattcttgaacacacgaggcactattgtgactctgctctgaggtac

SEQ ID NO: 6562 - DNA, 292 bp, Triticum aestivum
  Clone ID: uC-tsro9316117d08b1
tccatgcgtccggctacgcagcacacaaccctgtggaccgccagcaatccatccatccaccgaaggctcagcaggatgtctccttggctggcggggggattatctgtccccgctcgtgtatggtcttccgtgtatcatggagttgagaaccatgaggactgcgttctgaggttggcggccatcaagcacaagaggatgcaccggtttatatcctacaggctgcaaaggattggctggggctatgggggacagactggtgagcgcgagggaacatcctaaggcgtgatcaaga

SEQ ID NO: 6563 - DNA, 245 bp, Triticum aestivum
  Clone ID: uC-tsro9316117d11b1
gtttctatatgcttctttgtatgttgtaaaatatgctagagatcacgagcaagcttggactaggttgtgggggtggtgtgtaaaatacaattgatttagtttgtattaggtggttgatttaggttttttttttagtttggtggctgatttagttgagccaacatctcatgtgtcaaatgttgaaagttacttcagttcagaatcactataaacctaactgcggctgaaactactccgatcagctc

SEQ ID NO: 6564 - DNA, 457 bp, Triticum aestivum
  unsure (1)..(457): unsure at all n locations
  Clone ID: uC-tsro9316117d12b1
tgatgtcagacaagcgtatcaggcacatcccggtgataagcggcaccgagatgatggggatggtctccatcggcgacgtggtgcgcgcggtggtcagcgagcacaaggaggagctgaaccggctcaacgcctacatccagggtgggtactaggaccccgccgttttgcagggcgtccctttgaatgaactcgaataacgaccagggtgatgatgacgaaataggccgtgtttcttcgcggacaatggccgttgaacttgaatttgggtgtgtgatgttttcctgcttatttagtgtatatttccgtggccgcgcgcgccgccacgcacttgtttctggagcgtatagaccatccatctcagctgatggtgatagacgcagaataaagcttgggagtgtcctggaaaggatacttgagtttcgccgtgctaaaaaaaatattaaannnaattaatttt

SEQ ID NO: 6565 - DNA, 389 bp, Triticum aestivum
  unsure (1)..(389): unsure at all n locations
  Clone ID: uC-tsro9316117e01b1
cccacgtgntcgcccacgcgtccggatgtaggttggtggtgtgtagtttaaccggaaataagctccccgattcggggggttgggtcgtgattggatttggtgggaaacgccaccaactaactaatccttcgtggaatgtaagaatcatttgtgacagagataaatacacttgtggtcactgtacttgnggccaaaaaaaaaaacaaaaaaaaaaaaaaaaaaaaaaaaaaagaacttggcactacaagtggaaaaacttaaaagaagaatttgaataaccgagaataaaaacaagaaactatccatcaaaaaacaacgggggggctttttaaaaaccccacttttccccacctggtcttgtaagaataaattttttttttaggggcccc

SEQ ID NO: 6566 - DNA, 416 bp, Triticum aestivum
  Clone ID: uC-tsro9316117e02b1
cccactttttcggcctaccatggtggtgacggggcgtacgtgagccctagcgggttcgaggaggcagcgccggcggcggagatgtcgacgccgccgagaaagcgcctgatgcgggacttcaagcggctgcagcatgacccaccggccgtgatcagcggctcgccgcacgacaacaacatgatgctctggaacgccgtcatcttcgggccggatgatacgccatgggacggctgcacgttcatgcttaccttgcagattacagaggattaccccaacaagccgtcaactgttcgttttgtctctaggatggttgaccgatatatttatgctgatgggagcatcggcttggatattgtacagaatcagtggcgccctatatatgacgttgctgccatattgacttctattcagtcctt

SEQ ID NO: 6567 - DNA, 244 bp, Triticum aestivum
  Clone ID: uC-tsro9316117e04b1
cggactcttggggccatgtgtcatgtgtgccttgctctcagcagggaagttgagttgctgtatgttgcgtagcagaacgatgctttctgcctgtgaatgtaaaacataagattgcctatgtgtcacgactcaaatggcattgtcatcttaaaaaaaaaaaaatgaactcttaaatgaaaaaaattggaatgaattctgcagaaataagaaggcaaaatggccaatacaataaatctggtagtga

SEQ ID NO: 6568 - DNA, 500 bp, Triticum aestivum
  Clone ID: uC-tsro9316117e08b1
cccactcgtccggtcggtggacagcttcggttccgggatggaaaccaacgacaccttcggcgtagatagtgcatcgccgtcgtcgaccaacgatgagatggacttctgggtcacactgttcatgcaggctagtgacatacagagtttgtcacagatttaaattttaatgagaagattgggctatgttcatatttctcgatagcattcgcggcggaccaggcgagcggcctggccgaacctggaccgggacgaacaaagaggcttttggccggaagtttctgtagttcgtcggctgagttgacccttgttgctggctcagtttcacttgcgcattggctggccatagcgagagaattttctccggccaggacgtgaaactgaagagacaaatgatggggcggaaaggttgacacgatcaaggactgaaagcctgataataccttttagcccgaggttcatattgtgaaaataccaaggagctaaatagaagaatttggccc

SEQ ID NO: 6569 - DNA, 389 bp, Triticum aestivum
  Clone ID: uC-tsro9316117e09b1
atccatacgaggcgtacacgagcttgatttagagggggtcgggcagagctacaagagtgggaggcggaggggagctggtctacatcaagatattgggaggcggaggggccgtatggcgactagctgcgcaacacagaagcaagcagcgacggtgctactacattatacaaccgcgtcgactacgagagcactcatgggaaccttagcccgacgagacaacaaccccttttcccggttccccctgtcgcgccggcgcctgaggaaactgccggtcgaaatcccgaccggcggacggtggacaaagggcttactgttagaacgcgcggcgtacctacctaatgcgagggctacaagagggggaggctcggactccggcgcttagggcggaa

SEQ ID NO: 6570 - DNA, 505 bp, Triticum aestivum
  Clone ID: uC-tsro9316117e11b1
ccctctcgtccgcggacgcgtggggtggaaacaggttcatcaagaccgctgcttatggtcactttggccgcgatgatgccgacttcacctgggaggtggtgaagcccctcaagttcgacaaggcatctgcctaagaacaagacatcacattggggttattcttggtctgctgcctctcaagttcgacaaaggcgggatccttttgctcctgggaagtaagaagaagcattcgacatcaccgcgacgtgctacactggtcgtgccgtctagtgatcagtgctaagttttcttactggtgtatcatttcatatatttttccttttctttttgagtctgctgaaactgctgagtgatgtgcaatttgctctgtcacttcgtcactttcacttttcatattctgttttgtgtagtttcccctcataatgctctcctcataatgctctttcttccagagtttaaagagccatgtgtaattctattgccctattgttcccaaattgtcatt

SEQ ID NO: 6571 - DNA, 463 bp, Triticum aestivum
  unsure (1)..(463): unsure at all n locations
  Clone ID: uC-tsro9316117e12b1
aaacttccctgatcctggtcggtgttgggacattgttgacaaatacggagtgacaatattttatactgcaccaacacttatccgttcgctcatgcgtgatggttccgtgtatgttgatcggtactcacgtaagtctctccgagttttaggaagtgtgggtgagccaattaatccaactgcatggaggtggttctataatgttgtcggtgactcgagatgccccatatcagacacctggtggcagactgaaactggtggttttatgattacacctttacctggcgcttggcctcagaaaccaggatctgctacatttcctttctttggtgtacagccagtgattgttgacgagaaagggcgggaaatgcccggagaatgcagtggatacctttgcataaagaagtcatggcctggagctttncggactctgtatggagataaggacagatatgagacaacatac

SEQ ID NO: 6572 - DNA, 535 bp, Triticum aestivum
  unsure (1)..(535): unsure at all n locations
  Clone ID: uC-tsro9316117f01b1
ggagatctttcgcgtgagggtaatgacttgtacagggaaatgattgagagtggtgtcattaagcttgacgacaagcagagtgagagcaagtgtgctcttgtgtacgggcaaatgaatgagccccctggtgctcgtgctcgtgttggactgactggtttgactgtcgctgagcatttccgtgatgccgaaggacaggatgtgcttctcttcattgataacattttccgtttcactcaggcaaactctgaggtgtctgctctgcttggacacattacatttgctgagggataccaaccaacccttgctaccgacctgagagggctgcaggagcggattaccaccacaaagaagggttctattacatccgagccagctatatatgtgcctgctgatgacttgacagatccggcccctgctaccacttttgcccatcttgatgctaccaccgtgctgtcgcgacagatattcgagctcggaatatattctgctgtcgatcctttggacttcacattcagaatgtngtcttctcatgttc

SEQ ID NO: 6573 - DNA, 346 bp, Triticum aestivum
  Clone ID: uC-tsro9316117f02b1
tcttaccttattgacactgtccgcagaaggatgatgatgacctccggagaggccgtcaagtacaagagctccttggatgctttccagcagatcctgaagaaggagggtgccaagtccctcttcaagggggctggtgccaacatcctccgtgccattgctggtgctggtgagctctccggctatgatcagctccagatcctcttcttcggcaagaagtacggctcaggcggtgcctagaggggacgaaatgatgacgaacaagagaagtttgttcccagacctacccttcgaggatctggcgaacttttatctttttaacgttggaaggcaataattattgcagagg

SEQ ID NO: 6574 - DNA, 455 bp, Triticum aestivum
  Clone ID: uC-tsro9316117f05b1
ggccgttgtatcccaagcgagtcctcgtgttcccgtgcacacacgcctaagctcgaaccatgtcgtcgcagcggatggggcgtcaccagcgccgggcgtctcagagcgtgttcgcgctgccggagaacttcgcggccctcgacgacgtgccggcgtccgacgagcaccggaaggcggacggcggcggcgcgaccgagcagcagcagcagggggcggggcgccaccggcgggccatgtccatggccgtcgcctcctccagggacctcgagatgatcaaggaggacgtcggcggctacagcaactacaagattggcgcctagattagtgccaccggcggcgcgcacggccggcgcggctcagagcacgcacgtgtacggtgttcgtaatacgtgcgtgcgcgcgtgctcggtggcgctctcggcggagctggggcctcgcgcgcgcggctgagcttt

SEQ ID NO: 6575 - DNA, 76 bp, Triticum aestivum
  Clone ID: uC-tsro9316117f06b1
aaaaatttattaaaaaaaaaaaaaaaaaaaaaaaaaaaaaaaaaaaaaaaaaaaaaaaaaaaaaaaaaaaaaaaaa

SEQ ID NO: 6576 - DNA, 460 bp, Triticum aestivum
  Clone ID: uC-tsro9316117f07b1
gtctgttcgaaaggttgttgaggtgatcaacaagcttatgtggctggcatcagtttgcacaaccatttctttcattgcctcatgctatattgtgctaggccgccatttccaatgggcagcaatactggttagtttgataggtggtgttacaatgactggtgttcttggaacaatgacgtactttgtggtgaaatcaaagcgcatgaggaagattagaaaaaaagagaagatgtcaagaagaagcggctcaagctcctgggttgatactgaaatctcagagactgagcttaatcaagtgtatgccttgtaaagagacagggtgtttgaactcagccttgcctctgcaattgagaatgtacatgcttaatcaagtgtatgccttgtaagacacagggtgtttgaactcagcctcatatctggaatcgagaatgtacatgaaaattccagatgcgcgcattac

SEQ ID NO: 6577 - DNA, 365 bp, Triticum aestivum
  Clone ID: uC-tsro9316117f08b1
gacttttacggacctggtgcagcggcagaaggaggcgatcaagcagcggaaggccatcaggatgggcctgcagtcggacaaggactggaccggcgacgggttcgtcaaggagaccgagagcatggtctccaactgatgccgcaaccccgcctgatctctcggtctccaactgatgatgcaactcagtctgatctgatcccctcacgacgaccttcctttccaccatacttccttccacttgtgattaaacccggacctataaacgaaacgaaaagaacagtgggaacttttgctgcacctcatcattcaataaagcattgtagtgtaaaaaaaaatattaaaattaaaaaataacccaacaaaaa

SEQ ID NO: 6578 - DNA, 540 bp, Triticum aestivum
  Clone ID: uC-tsro9316117f10b1
cctttttgtccggcgattgccgtggccatgcagcccgtgacggtctacattgacgccagcggttttgagttccagttctactccggcggcatctaccgtggcccctgctccgccaatgtgaaccactccgtcaccatcgtcggctactgcgagggtcctggccagggaaacaagtactggattgccaagaactcatggagcaacgactggggtgaacaaggatatgtgtacctcgcaaaggacgtgccctcgtccacgggcacatgtggcctcgccacctcgcccttctaccccacggcttgaccacaggcagcactatgtgtgatatctaaggaattgcttccgtttcgttgtgataatgctaaattactatttttgttatacttccctttaatttgatcaataagcggtagaccgtgcgtgcgatagcatggcctgagtgtaataaatcgtcgtgtgaattacactttctacaagttaattgtacatttctgacacatatttaccgaattaacggatgccgtgtcgaaatatccatct

SEQ ID NO: 6579 - DNA, 486 bp, Triticum aestivum
  unsure (1)..(486): unsure at all n locations
  Clone ID: uC-tsro9316117f11b1
ccttattgtcatcatcctcggcgacagcggggttgggaagacttccttgatgaaccaatatgtgaacaagaagttcagcaaccagtacaaggctacgattggcgccgatttcctcaccaaggaggtgcagttcgaggacaggctcttcaccctacaaatatgggatactgccggtcaggagaggtttcaaagtcttggtgttgcattctaccgcggagcagattgttgtgttctagtttacgatgttaactcgatgaaatcatttgataatctgaacaactggcgtgaagagtttctaattcaggctagcccatcagatcctgataacttcccttttgttctgctgggtaacaaagttgatgtagatggcgggaatagccgtgtggtctctgagaaaaaggcaaaggcatggtgtgcctctaaagggaacatnccatactttgagacttcttgtcaggatggaatcaacgtggaggaagcttttca

SEQ ID NO: 6580 - DNA, 402 bp, Triticum aestivum
  Clone ID: uC-tsro9316117f12b1
cctactcgtccgggcgagcgcggcgtgcagctgtcgggcgggcagaagcagcgcatcgccatcgccagggcggtgctcaaggacccggccatcctgctgctggacgaggcgacgagcgcgctggacgccgagtcggagagcgtgctgcaggaggcgctggagcggctgatgaaggggcggacgacggtgctggtggcgcaccggctgtcaacgatccgcggcgtggaccgcatcgccgtggtgcaggacgggcgcatcatctagcacggcgggcactccgagctcgtggcgcggtccgagggcgcctactcccggctgctgcagctgcagaaccaccgcaactgatggaaggacctgatcgatgccatgggtggatggatggatgggggctcgatttttgtg

SEQ ID NO: 6581 - DNA, 452 bp, Triticum aestivum
  Clone ID: uC-tsro9316117g02b1
cgtcgacgccgagaagctcagggagatcggcttcatcgcctactccatcggcaagccgctcgacggctggctcaaggacatgcccgccgtggcctaagttcacctcgtcggccggccggatcggaggaagagcaagaagtggtttgaccgtgattcattctttatagtttgcattttgcaggagaagcatccacattttctctctcggccataagaatttagtaaatcttcatgtcttgttaagtttccgatacatgtttgcgccaccccgtctgtagatcttacttataatcaaatcctcgggcccctgtgctgcctgaggaggtttttccgctgtatcccatgaacgaactttgtagcctgttttgctgaaatcattacagaatccaatgtgttttttcatcaagtttgtagttgcttctcaaaaaaaacaaaatcgacccctaacaccc

SEQ ID NO: 6582 - DNA, 72 bp, Triticum aestivum
  Clone ID: uC-tsro9316117g04b1
cccactttttcggcgacgcgtccggaggcgccaacgttcacgcctccggccacgcgtgcgattagatcgcga

SEQ ID NO: 6583 - DNA, 349 bp, Triticum aestivum
  Clone ID: uC-tsro9316117g07b1
ctcactcgtccgagcaagagcactggaaacgctggtgcgcgtgttgcttgcggaatcatcgggctccagggctaagatgtcatctccaccggccaacgtcgtacagatctgggaaccttttcaggatgcagatttgcaatctctattctaaataagcacatgatctttgatcacttgttagtgtgcaccattcgtgtcaattcctatgtgctactctgaactttatcactgtcatttggcttttaaaaaaaaaaaacaaacaaaaaatgaaaaaaaaaaaaaaaaaaaaaaaaaaaaaaaaaaatacaaaaacgcccctgtgtaaaaaaaggaagatcaaaaccaaagg

SEQ ID NO: 6584 - DNA, 304 bp, Triticum aestivum
  Clone ID: uC-tsro9316117g10b1
ggtttgtgatatcagcaagtgccagttctaccttgacatgctgaacgagtgccgccgtggaggagcaactctttaagctactatctttgcttgattggggcttaattgggcagaacctgttttcagtcatgatgatgatgatatatatctcctaaataattcattggcaatattatgaacctatgccacagcttgtgtctattacctaccctagttcgtggtctctgttgtcccgggagtatttccttgtattgatgttggaattaccttcatggcagtgggtttataaatatggagtttgaat

SEQ ID NO: 6585 - DNA, 199 bp, Triticum aestivum
  Clone ID: uC-tsro9316117h02b1
ccgtccatagatttttccggtgaatgaatgaaacaaacatggctgatctgaccagcccctagttgtaaagtgctaccaaatatatggtttcggctgtccgtcttctagagaggttttaatgttctagtggagttataccgagtttggacgcacggcgaggatgtgattgccttcgtgttttacccaggttcccctaact

SEQ ID NO: 6586 - DNA, 412 bp, Triticum aestivum
  Clone ID: uC-tsro9316117h07b1
ctcactcgtccgcccacgcgtccgcaagtatgttttcttgtttctttctttcaaagtgcgtgtgttgcagcaactgtttacactttgatggtctcgcacctttgtggctccagccgccacatcagatgtataggtttcagatgaacattactccattattagtatcactctttaaaaatagagcatatactgatgctaaaaaaaaaaaaaactggaagaacaaaaaaaaaaaaaaaaactaaagggggaaaaaaagaaaaaggaagaagaaaacaaaaaggacaaaaatagacaaagggcggagaaaaacatatacactgaatggaaaaaaaaaaataataaagggggcggcccttttagagaaccaaacttttttccccggggttgggaagataaaagtttttttttaggg

SEQ ID NO: 6587 - DNA, 450 bp, Triticum aestivum
  Clone ID: uC-tsro9316117h09b1
cgtctttctgcaggagtacaacatcaccaagaagatcgagcacgccgtcaagtcgatgcagtacgactcggtctccatctccgcggtcgaccccgagttctactcggagcgcttcctcaagttcatccagaccgtcttccccgagaactcgtagcgcctcggcccaccaccatccctcaaccagtgaacgctccatttccctgccatggcatgatcctgtgtagagaacgaggaacgagggcgtccgcagagggtcttctggagggctggaatttttttttcaagcatgagcacaaaccatgtctttattctgggaataaaggtggcatggctgggttatggagcatggagaatccaccggtgtcccgctgtggaagagaggaagagcgtccgactttctgcgcgaatatgtgtgtccgtcgagatcaagagcgatgtgctgggcatctg

SEQ ID NO: 6588 - DNA, 496 bp, Triticum aestivum
  unsure (1)..(496): unsure at all n locations
  Clone ID: uC-tsro9316118a04b1
atttttaggcatagcgctgctcctcgtggtggcggaggcacgcggctgcacattctgcaaggacatgccgggcatctcatcccgcggcggtgctgtgcttcgggtggacaatggggtgacagaagggcaagaagcaagcgaaggagttgcgctacaggcagtgccggctgaggggcccaagaagaccacgctcatggctagctgctatcagcagtgcattgcttatatccactacccatatatttttgaatcttgcatgagtcagtgccacccaaccgctggaatcgtcggcgtcttgggggatgccaagaagacgntgcagacgaaacagcagtagcagcaagaggaggcaacaggaggaggatttggggtcctggcaatgccaactgagcatgccgggcgggaataagaagggaagcggaagaggacgcctgggcccggcaccatcttcatggccatctgacaacccaagatgggcgacccccgcgagtacatg

SEQ ID NO: 6589 - DNA, 501 bp, Triticum aestivum
  Clone ID: uC-tsro9316118a09b1
tgtgcacaccacaccactcctccactccactccactccccgccagcacttcacgtacctagccagccagcaatggcgatgcagccgggcggcgagggggagacgctgatgcagcggtgcaagccgtacgtggcgatgatctcgctgcagttcgggtacgccgggatgaacgtgatcaccaaggtgtcgctgaaccacggcatgagccactacgtgctggtggtgtaccgccacgccttcgccaccctctccatcgcgcccttcgcgctcttcctggagcgcggcaaggcccgcccgccgcggatgacccccctcgtcttcctcaacatcttcctcctcgccctcatgggccccgtcatcgaccagaacttctactacgccggcctcaagtacacctcgcccaccttctcctgcgccatgagcaacatgctccccgccatgaccttcgtcatggcggtcatcttccggatggagaaggtggaccttaagaggccaggtgcat

SEQ ID NO: 6590 - DNA, 550 bp, Triticum aestivum
  Clone ID: uC-tsro9316118b03b1
tttttacccggagggaggaagcagcagcagcaggtcagcgagggaggagtagaggggatggcggacaagaagggcggagcgccgaggaaggaggaggtcgtcacgagggagtacaccgtcaacctccacaagcgcctccatggctgtaccttcaagaagaaggcacctaatgccatcaaagagctcaggaagtttgcacagaaggctatgggcacgacagacgtcaggatcgacgtgaagctcaacaagctcatctggagcagtgggatcagaagcgtgccccgtagggttcgcgtgaggattgcccgcaggaggaacgatgaggaggacgccaaggaggagctctactcactcgtcaccgttgccgaggtgcctgctgagggtttgaaggggctgggaaccaaggtcgtcgatgacactgagtagactcttttctttatctacatcgttagaatgagctgttatttggaattgcaccagcatgctttttgtatcccgcagagttttggagatggaatatcggagctattattttcttatctaaatttga

SEQ ID NO: 6591 - DNA, 516 bp, Triticum aestivum
  Clone ID: uC-tsro9316118b04b1
ccttccgagtctccacccatacccagccgccgccggcggaaagagcacggcgagatgagctcggggatgggcaaggtggtgtgcgtcaccggcggctcgggctacatcgcctcctggctcgtcaagctcctcctccaccgcggctacaccgtccgcgccaccgtccgggacaccgccgaccccaagaaaacattgcacctgcaggccctggatggagccaaggacaggctgcacttgttcaaagcaagcttgttagaagaaggctctttcgatgctgccatcgccggttctgactgtgtgttccacacggcttctcccttttatcacaatgtcaaggatcccaaggctgagttacttgacccagcagtcaatggaacactcaatgttctccgttcctgcaaaaagcctttataagagagtgatcaaacgtcgtcatggtgctgttgctacaatggaacccagactcctgatgggtagtgatgagacatgttttcagtcagagtctgtgaaagatga

SEQ ID NO: 6592 - DNA, 77 bp, Triticum aestivum
  Clone ID: uC-tsro9316118b05b1
tgtatgcgtggggagcccacgcgtgcgcccacgcggacgcccacgcgtccgcccacgctgccggctgtagatcgtga

SEQ ID NO: 6593 - DNA, 250 bp, Triticum aestivum
  Clone ID: uC-tsro9316118b07b1
ttaaaacatagtaaaatgtataaaattacgcagctttccccccaccactggtggggggttttggagctgaccccttaggaaaacaattcttcgattgtttgctagatacgttatgagacggacctgtttaaggggccgttccatttctgaagctaacaaactttaagtcgttgatttgcctgcgatttgaagacgtcgtagctgcatctgctctggttaatttcagtgcatttgcggctgtttttattgc

SEQ ID NO: 6594 - DNA, 457 bp, Triticum aestivum
  Clone ID: uC-tsro9316118b10b1
ttgtatagagagccatggcctatgccctttctcaccagtggcaagcaggttcaaggcaacaggcagccattacagcttctgaactagacaggaacagctggagctggaattggctggagagatggatggccgtccgcccgtgggagagtcggttccttggcatgtacgcagcagatggaattgccattgataccggagcgcacaatgctgagggaaatgcaaccaaggctccatacaggaaacctgtgaaaaagcaggtttcagctcttcattcaagtgtgttgatccagaaggcccgcccctcgaactcggagggtggtggctccttgtcgaacccgtctgccggttcggcgtcagctaaaccgaaacggaagctgccaccaaaggaaggttctgatgaagtctcgtctcgtctttcgggacttggtgcccggagcagtagtaatcctaaggagag

SEQ ID NO: 6595 - DNA, 76 bp, Triticum aestivum
  Clone ID: uC-tsro9316118c03b1
gtttagtttttatatgtaggtcatggagacattttgcttattattactattgaaattgaaattgtgccacgcgtcc

SEQ ID NO: 6596 - DNA, 402 bp, Triticum aestivum
  unsure (1)..(402): unsure at all n locations
  Clone ID: uC-tsro9316118c04b1
attgggttcgtccacacacttccgccgccgccgccgacgacgcgaaaaggagagcgaggccgactccgccgccgcgatgagggccaagtggaagaagaagaggatgaggaggctcaagaggaagcgccgaaagatgaggcagcgatccaagtaggcgccttggagcagcggaagcatcatcctacatccaggctgccaggcaccgagggatgacggcatggtctagtgattcctggcgtgtttgctgctatggctgtggaagctgtttaacctgtgttatgtccaatttagctgtttaattctagtctggttatgttccaagacagagttttatgtaatgtggggattatatgntgtttgtgactgaattttatgcacctattaattttgcggcgtctaana

SEQ ID NO: 6597 - DNA, 543 bp, Triticum aestivum
  Clone ID: uC-tsro9316118c05b1
ttgttcgcgtggggtgggcgccaacatcctggtcggcggcgccttctccggcgcgtccatgaaccccgccgtctccttcggccccgccctcgtcagctgggagtgggggtaccagtgggtgtactgggtcggccccctcatcggcggcggcctcgccggcgtcatctacgagctgctcttcatctcccgcacccacgagcagctccccaccaccgactactaagcagcgagcttaggatcggagtcgccgtccatccgtccgtgtgatgcttcgtctcccccttccttcccgtcatcagtcgttttagtttctcgcgcggtcgccgcatgccatgatgcatgtatgcggagctcgcctcgtttgctttgaatcaatcagtcctgggatccgtcgatcggtcggtcagtcgagtcagtttgtggtgcgtgcgtggagctgtaaaagcgtggatgatctcgatctgggatgaccgacccagtcaatttgcttctgtaaaactgtgaattcgcctgcccgagtaatttcaagttcagttgagttgg

SEQ ID NO: 6598 - DNA, 506 bp, Triticum aestivum
  Clone ID: uC-tsro9316118c12b1
tcgtgtacctcctcccctcctgcccccgagcaccggagccgtcgccgacggcgccggcggcggcgactgcagccatgtcgctgatcgcgggtgaggagttccagcacatgcttcgtgtgctcaacaccaacgtctacggtaagcagaagatcatgtgcgcgctgacctgcatcaagggtgtgggccgccgattatccaacatcgtctgcaagaaggccgacatcgacatgaacaagagggctggagagctttccgcggaggagatggaccgcctgatggcggtggtgcacaacccgcgccagttcaaggtgcccgactggttcctcaacacgaagaaggattataaggacggcaggttctcccaggtcgtcttcaacgccagggacatgaagctcaaggatgaccttgagaggctcaagaagatcaggaaccatcgcggtcttcgtcactactgcggcgtgcgtgttcgttgtcagcacacaaagactacctgcaggagaggaaag

SEQ ID NO: 6599 - DNA, 438 bp, Triticum aestivum
  Clone ID: uC-tsro9316118d05b1
gttggagctgtgccggtgggcgcgggagcgcgggctgaagcgggcggcagtcaccaacgcgccgcgcgccaacgccgagctcatgatcgggatcctcggcctggccgacttcttccagctcgtcgtcgccggcgaggactgtggcgagggacgctccaagccctgccccgacccatacctccgcgcgctcgccctgctcggcgcgtcggcggagcggtctctggtgttcgaggactccgtcgtcggcgtgcaggccggcgtggccgcggggatgccggtcgtggctatcgcgagcgagagccgggaggccaaggtcgtcgccgccggcgcgtccatggtcgtcagggactaccgcgacgccaagctctgggccgcgttggacgccgtcgccggagctcccaagatagattcagagctgagcctgagcgcggtggagcc

SEQ ID NO: 6600 - DNA, 348 bp, Triticum aestivum
  Clone ID: uC-tsro9316118d09b1
taataaacagaaaaaaaaaaaaaaagaagaaaaaaaaaattaaaaaaaaaaagatgatgcaagaagagaatacacatgaagagaaagagaccttacaactggcgaaatgcgtggcccttaaagagccattgatgctctgtggaggacttcatgaggggggggtcttttgaggggcccccttctttcgctgggggggcggccgatcttttgtttttttttttgggggccaccatttgaagaactggcgccccgtgttgcaggcctgatgcgggggtagctcccgcggggcctaattttggcgctggccggcgtctccctttgtcgtggctgggaaaaccctgggggggc

SEQ ID NO: 6601 - DNA, 352 bp, Triticum aestivum
  Clone ID: uC-tsro9316118d10b1
tacctccgcgcgcgcgtggcggccgtgtcggagctgcgcgggaaggacgccaaccctctgaaccggctggagcggcgggtgcggtacctgctggagtcggacggggagctcctgctggtgaagaagctgtacagcgtggtgcgggactcggcggacgtggaggtggaggtgagccggttccggccggaggggtgcaagtgggagtcggtgacggagctccccgggagggcggtgtttctggggtcggtggcgtcggttggcggctccggcgacggagggggtccgggagaactgcgcctactttgagcggttggacgtggggctgatggtgtcgcaggcgaagggaattttc

SEQ ID NO: 6602 - DNA, 489 bp, Triticum aestivum
  Clone ID: uC-tsro9316118d11b1
ttaatatttcagctgatcctcttctgtcatcatttggccttagcttcccaacattagatgctgaggaaacatcaaaattgtctactcccgctcagagtgatgtaccagtgctaaaagaggcagctgctcggccgtggcggtcaagtatggactcgtcgctcacaagggaagaaagggagcaagccagcgtgagagcggcatttgtgcaagacttgctgctctccaccctattcagagaccaataactcagaggcgagccgatgttaccgctacccgggtgccccctggaccctgatgcagactccgaaaggtcggtgcccccagaccaagttgccgaatgtgacatccatggaagatagatagggtttggcaccccagcaaggaaggaaggaggtgcatcagagtcgatgtgggcatgaggtgtcctaagttatttgtagccggtctttgagttggcagttaccgcgatctctgcaagcgatagatgtc

SEQ ID NO: 6603 - DNA, 298 bp, Triticum aestivum
  Clone ID: uC-tsro9316118d12b1
tttcacgcgatggctggctacgaggaagatgaggaagagagggagaacgatgacgtggtctcggattacgatgacgacaccggccgggcgaacctgaggcgctcgctgtcggggagctatgatctcgcatcgacctaagagccacacctgatgacatacatgagcttcgtgtgggacggtatggggtagggcttcgctcacccggagagctacctgtgggggcttgacgaggaggcacaattgtcgatcggcactatcgacatgtaggccgacatactaaaggtgaaaagggaacagc

SEQ ID NO: 6604 - DNA, 455 bp, Triticum aestivum
  Clone ID: uC-tsro9316118e02b1
tttctatgccttccttcgcacccgaacgcaagaaagacagacagcaacgcggcgtggggaaaagcaggagcgaagcgagggatcgggaggaacaccggcgaggccatggcgcggcggggcacggaggcgttcccggacctgggcgcgcactgcgacagggaggactgcaaccagctcgacttcctgcccttcgactgcgacggctgcggcaaggtgttctgcacggagcaccgcgcgtacgttgagcacggctgcccgcgcgcggccgaccagggccgcaccgtcgtcgtctgcgaggcctgcggcgactccatcgagcgcgacggggcggacaagacggatgcggagatcctcgagacgcacgcgcggtcgcgccggggctgcgacccggccaggaaactcaagccgcgctgccccgcgcggcggtgcaaggagacgctcaccttctccacacg

SEQ ID NO: 6605 - DNA, 74 bp, Triticum aestivum
  Clone ID: uC-tsro9316118e03b1
ttgattactgtaatcttgtatgtttctgaacatttggattcgagttcagtaaagtgtctgccaagatttgtttg

SEQ ID NO: 6606 - DNA, 392 bp, Triticum aestivum
  Clone ID: uC-tsro9316118e05b1
tttacgcgtccgggcgtccctaccaccgccatgacagagatagagctccagtatgctgcaaccttctttgcaaaaatgctaccacccgtccatggcaaggtcttcgtggtgaccggctttgggtacaccctgggtctagatttggccacggcaacgttcgtgatactacagctaccagctggagtgcggtacaattacatgctctcatccgcggagggttccgggatctatcttgtcactgcggaccggtttcagctcagcgtgtggcttcatcggatgacaggtgacaaccatggtgcaggcggttggctcttggtggacacgttttctgttctcgaagcatgcacacgttttgcgggtgacagtttgggtgccttgtgaatattttaatg

SEQ ID NO: 6607 - DNA, 546 bp, Triticum aestivum
  Clone ID: uC-tsro9316118e09b1
ttgtacaaaactagggggattgtcctgaggcaaaatatcccagtcgaggtacatgcatcgcaggtttacaccagaacaatgtttgagaaatttggtgaagcattgtacgtgtgtgggtcgtatgatctagtagaagtcaagccccaattggattacattgctaggcacataaaattccagtcaagggaaaagtggtgcaagaatgagtttgtcatctccgtgagtgagacagccgatgagttcaggtgcgagtgtggaacatttgagcactatggaatggtttgcagtcatgcgcttaaggtcatgatgcacctaaaactgcatgagctccctccgaaacatgtgctcaagcgatggactagagatgcaagagatatactactgccggagtatttgcgctaccagaaggaccatgggcctctgaagtattcttctcatcgacacaacactttacacttgttggcagtggatgtggttaagttaggtgacagcaatgtggaagcatatgcacttgcattggagaaaatgcgagatgtcaaagtgatg

SEQ ID NO: 6608 - DNA, 465 bp, Triticum aestivum
  Clone ID: uC-tsro9316118e10b1
tttcgcaaggagcttgggactgagtacttgactggggagaagacacgatctcctggcgaagaggtggacaaggtgttcatcgccatgaaccagggcaagcacatagacgcgttgctcgaatgcctcaaggagtggaatggtgagccgctacctatctgctgaacgacgtatgagaaattgaagagaagatagtgtgcttcagatttcaaagaatccggatgttcttagttgacaagtgataataatgcttttcattgtattctctagaaatgttatgttttgaaacttgctcttacagagctgttcttttgttgccaaaaatttcaactagattgtttaagtggtatataaccaatacaacttctatgatgtaaggtaacagcgtacaatatatggtaagtattcgtgataaatgtactggttccttttttgagatcaaatggtccggtggaggcacacggcatt

SEQ ID NO: 6609 - DNA, 476 bp, Triticum aestivum
  Clone ID: uC-tsro9316118f01b1
tcttcgcgtccgccaagctccagacgcctgctcctgccccggcgccgccgcacgctccagagaccgcaggcatgggcgtcttcaccttcgtgtgccgcgactccggcgccgagtggtcggccaagcagcacaagggcgagctcgaggcctccgccgccaccccctacgacctgcagcgccagctcgtctccgccgcctgcgccgaggacaagtccggcggcgtccagtcctccttcaccatggtctcccccaagtccgccatcttccaggtggtcattggtggtgcctctgctggtccgatcggtggtggtggtgctgctggtggtgccgcagcatcaggcggagcttgccgtgaggcccccaaggctgaggagaagaaggaagaagagaaggaggagagcgaggaccaccttggcttctccctttttgattagatcttttttaccactgtgcttcgcagaaatgacatggttcta

SEQ ID NO: 6610 - DNA, 570 bp, Triticum aestivum
  Clone ID: uC-tsro9316118f04b1
tttagagagctcgctctccgtgaatgatgtcgaggaagaagaggaagaagaagaagcagtgtggagcacgctgctgctacctggtcatgctctcagcagtgtgaatctccagaagcatgcttgccgtgccttcttccgggtgcaccggaggctggcatgtgagcaggggtgcttcagtgatgcagaagaaaaaaggcaagtcttatcggcaagggaaggctacgcctttcttccaggtctccctctctccatctaaatctgtgtttggaggagggggctacggttagttcacccaccggtttactgtgtccttgtgagttgtgatcattatcatgcactcgtcagttgcttgacatgtatggtgtcgttcttgaattttcagctacatataatggtcggttgtgtgagtgaatgggagtgtgttcatgtgtcggtctgtgtgtcgactgtcactgtgagtcaattagctaaaagaagtgtgatgtgtgggttcagcgagggagtaacagtcacttgataagaatgtaagtgtcctatcatatatgtattgcttaaatagtaacatgtaac

SEQ ID NO: 6611 - DNA, 428 bp, Triticum aestivum
  Clone ID: uC-tsro9316118f06b1
ttcatcgcgtccgcccacgcgtccgcccacgcgtgcgcacgacgcgaccgcgaaccaaaccctaccgcgaacacgtcggcgatgagctcctccaacggcaacggcgggaagaagccggcgccgtccggcgggcgcgggggcatccgcaccctcgccgacatcaaccgcggcccctccggattcccaggcgcaggcggcagcggcagcgactccgatgagccccaggagtactacaccggcggcgagaagagtgggatgcttgttcaagatccaacaaggagaaataatgtggactcaatctttgagcaagctagagtgatgggtgctcagcaagttccactgcctttttttgaaggccaatcttccagctcaaccagctttgcaggaacaggtcgtctgctttcagtggatgcgcagacagcaccagc

SEQ ID NO: 6612 - DNA, 62 bp, Triticum aestivum
  Clone ID: uC-tsro9316118f07b1
gtcacgcgtccggccacgcgtccggccacgcgtgcgtctacgcgtgcggttctagatcgcga

SEQ ID NO: 6613 - DNA, 98 bp, Triticum aestivum
  Clone ID: uC-tsro9316118f08b1
tgtacgcgtgggaaaaaaaaaaaaaaaaaaaaaaaaaaaaaaaaaaaaaaaaaaaaaaaaaaaaaaaaaaaaaaaaaaaaaaaaaaaaaaaacacaag

SEQ ID NO: 6614 - DNA, 509 bp, Triticum aestivum
  Clone ID: uC-tsro9316118f10b1
tttagaacccatgacccacttggagtctattgcttcctctgcagtgcgggctgctattaaagttaaggcttcggtcatcatttgcttcacctcatctggacgggctgcaaggctaattgccaagtacaggcccaccatgcctgtcctctctgttgtcattcctcgtctgaaaacaaatcaattgaagtggagcttcacaggtgcatttgaggcaagacaatcactcatagttagaggtctctttcccatgcttgccgatccacgtcatccggctgaatctactagcactacaaatgaatcagtgttgaaggttgctcttgaccacggcaaagcatctggtgtgatcaagtcgcatgaccgcgtcgtcgtgtgccagaaagtgggagattcctctgtcgtgaagatcattgagctggacgactaggcaaaattagcctttgctcagggcttgccagatttttgactaggccaaaacgttgcttggtggctatgtataattctatctatag

SEQ ID NO: 6615 - DNA, 304 bp, Triticum aestivum
  Clone ID: uC-tsro9316118f11b1
cgccggcccggaatttgcgggttttcccacgcgtatgtttagcaccagatcgcgagcggccgagcggggggattaaaaaaaacggccgcgagcatgccacgtcatagcataagaaacccgacacccaaactcaagccactggccgccgtcttacaacgctggagacagggaaagaccctggctaaacaaaatgtaatcgcctggcacaacattcctctttcgacagcaggtgaaaaaactaataggcccgaacggaccgcccattccaacacttgcgcagactgaaaggagaatgggacccaca

SEQ ID NO: 6616 - DNA, 532 bp, Triticum aestivum
  Clone ID: uC-tsro9316118g08b1
gtgcgcagcggcgccctttttttttttttttcaggaataaaattattctaatccacaaacagatcaacatatatcatgcatgtaacaaccagaagcaagagggaggagaaccggagaggaatatagagctgtatgtgcagatgctataagacgatggcacctagggcaggagagtgctggctgtgtgccacgcattgcctcttgaacaactcctgctccgccggcgcagctctccccctcttctctccggcgatgtcgacgccaaacagcctcacgacacggacttgttctccattagctgcctccgccacaggcggagacgccgttgcagcgccgccgtcagcggggcagctcgccatcgtcttgttcttcttgcagtcgatgaagaactgcttcttttgaccgtacgccgagcacgagaacacgatggaatcgccggcaccgaggcccttctcccggacaaagcggctccaacccttggtgaggacgtagctcttgctgctggtccagtacgagtacccggaacctcaca

SEQ ID NO: 6617 - DNA, 312 bp, Triticum aestivum
  Clone ID: uC-tsro9316118g09b1
ttgctcacgcgtgcgcccacgcgttcgtccacgcgtccgcttacgcgttcgtggacgcgtgggatagaagagtttttatttgttgttgtatttaatatttatgtggatattgtatccttcagtgcaatttattgttttgtgagtagatgtatgtataatgatgaattgtttgtcttgttagtgtttcttggttttcaattattgtttgttgttattttttggtttataaagaagaatttgttttttttttttcagtgatgtaagagtaattttatgacacgaggcctaatttttgtactttagttgttttta

SEQ ID NO: 6618 - DNA, 71 bp, Triticum aestivum
  Clone ID: uC-tsro9316118h03b1
tagttcttcaacaaattttagtgctccagtcagtgtgaaaacacacgtgcaatattttttttcttctgatc

SEQ ID NO: 6619 - DNA, 509 bp, Triticum aestivum
  Clone ID: uC-tsro9316118h04b1
gttctttcgagttctcggctgctttctccgtcccggtcatcaatcttcgtcgagcagagagagagagaaggaggtggtcagatttgcgcgagatccatggggaagtacgtggagctgctggacatgggggtgcgcatcgccgcgcggttccactcccactgcccgcagacggcccggatgtactaccaccctcccgcctcctcctcggccgcccccggcgccggcgacgccggcgggatggtgcccggcgaaggaggcgccgtggccatggccatgatgaagaggcagcagcgggccgccatcgacgccacggagattattctctacaccgtcgtctaggccggctgctgctgcgctcatccggatgtatcccgccattgaagagagagagagagatgctatcttcttttattgtacttttggtttattttcgaatcgaggagagggagatgaaatatgggagagaatgttcaattgattgaatgaatggattgaagaacttgcgagtt

SEQ ID NO: 6620 - DNA, 539 bp, Triticum aestivum
  unsure (1)..(539): unsure at all n locations
  Clone ID: uC-tsro9316118h12b1
ttctactaccccgtggcccagtaccacttcgacctgagcggcacggccttcggcgcgctggccaagtcgggcctcaacgagaagctccgccactcgggcatcatcgacatccagttccggagggtgccctgcaacttccccggcctcaagatcaacttccacgtggtggacggctctaacgcggtgtacctggcggtgctgatcgagtacgaggacatggacggcgacgtgatccaggtggacatgaaggaggccaagtcggggtcgtggatggccatgcgcgagtcctggggatccatctggcggatggactccaaccaccgcctccaggggcccttctccatgcgcatcaccagcgactccggcaagaagctggtggccaacgatgtcatcccggccaactggaggcccaacaccgactaccgctccttcgtncagttcagctgatccgaccgacccatgggcagccacgtgcgcctgcatcatgcatgcatgcgctctggcccctctgcttgctacggattaaatcactcgccgat

SEQ ID NO: 6621 - DNA, 298 bp, Triticum aestivum
  Clone ID: uC-tsro9316120a05b1
atatatgtgtcttgattccaagattcacttgtgctgattgtcagatagtgttggtagattattttgataactttaggccttcattttcttatcttccattgacacaagcacttttatcatgttagtaacgtctgtaaatagcatgattactgcctagctgctatgtgcctattttctctaaaaaaactgagacatgtttgagctgaaaaaaaaaaaaatcttaaaaacaaaaaaaaaaacaaaataaaaaataaaaaaaagcaaatgaaaaaaaaaaaaaaaaaaaaagaataaagaa

SEQ ID NO: 6622 - DNA, 78 bp, Triticum aestivum
  Clone ID: uC-tsro9316120a06b1
cttacgcgtccgagaaaaggatattcgcttgcggggattcagtaaaaaaacaccgaagaaactgcaaaaaagaaaagg

SEQ ID NO: 6623 - DNA, 79 bp, Triticum aestivum
  Clone ID: uC-tsro9316120a07b1
cttcgtcatcgcgtccgcccacgcgtccgcccacggggccgtttacgcgtccgcccacgcgttcggttctagaacggga

SEQ ID NO: 6624 - DNA, 65 bp, Triticum aestivum
  Clone ID: uC-tsro9316120a09b1
tctttcacgcgtccgcccacgcgtccgcccacgcgtccgcccacgcgtccggttctagatcgcga

SEQ ID NO: 6625 - DNA, 68 bp, Triticum aestivum
  Clone ID: uC-tsro9316120a11b1
ttgttgcgcttgtgtattggttatttgctgggcattatgccttgatattaaagatttccgcccagtac

SEQ ID NO: 6626 - DNA, 304 bp, Triticum aestivum
  Clone ID: uC-tsro9316120b01b1
aataaaaaaaaaaaaaaaaaaaaaaaaaaaggggaaattttaaaaaaaacaacgggcaaaaaacaaaaaaaactataaaaagtcacacacctaaacacctgcattttttatactcctccccaccctcaatacctctcttcaggggggcctccttttcgtggcccccatttccccccccccgttccccgcgcgttattttcttctatggggcccccataatctatttccctgccccccttttacccccttgtgcccttgaaaacccccgcgctcccccccactattccccttcgtaacactcccc

SEQ ID NO: 6627 - DNA, 302 bp, Triticum aestivum
  Clone ID: uC-tsro9316120b02b1
cctacgcgtccgtatcgatatatgtctatgctgaatgcggcatgcttcaacaaaaaaaaaaaaaaaaaaaaaaaaaaaaaaaaaaaaaaaaaaaaaaaaaaaaaaaaaaaagggaggacagagggggggacgcttgagagggtccgggtgaacgcaggggggaaggtaaagcaaggggttccctaaagggaaaccaaaggccagtggattggcggggggtgtcaggcgaggggatggggaaaacccgggggatacccaacgaaagcgccttgctgaaggggggccggtgggatagctggggg

SEQ ID NO: 6628 - DNA, 206 bp, Triticum aestivum
  Clone ID: uC-tsro9316120b08b1
tcgtgaagcgactcacttgagagtgccaggaaggagatcgttctgtggttccctgagggcattgccgagtggaggagcagccagtacaactggatctacgaggcctaagatgcgtcatgagtggttgagtgcaggatttgcaaagcatctaccaaactagtctttggttgtttacagtactgagatcttgatctcgcgaacctagt

SEQ ID NO: 6629 - DNA, 411 bp, Triticum aestivum
  Clone ID: uC-tsro9316120b09b1
tgtacttggaccctgcttctctgccgtcctcgccgctgtgagctccgatcggcaatcttttctccgttcaagatgaccatcatcatcgagcagcctcagtttgatgcggtggcggagaggaaggtcgccggcgaccagggggagctcgtgctcgacggcggcttcaccgtgccggactccaacgccttcggccacaccttcagggactacgacgcggagtcggagcggaagaagacggtggaggagttctatcgcgtgaaccacatcaaccagacgtacgagtttgtgcagcggatgcgggatgcatatgggcggctggacaagacggagatgagcatctgggagtgcatcgagctgctcaacagttcatagactacagcgaccttgacctggacatgccaagattgagta

SEQ ID NO: 6630 - DNA, 388 bp, Triticum aestivum
  Clone ID: uC-tsro9316120b11b1
ttttacaagcccgagcctcctccagaaggccgtcttcctgatgctacccaaggctctgaccacctcaggcaggtgttttccactcagatgggtttgagtgaccaggacattgttgctctttctggtggtcacaccctgggaagatgccacaaggagagatccggctttgagggagcctggaccgccaaccctttgatcttcgacaactcttacttcactgagctccttagtggggagaaggaaggccttcttcagttgccgaccgacaagaccctcctgactgacccggccttccgcccacttgtggacaaatatgctgcggatgaggatgctttctttgctgactacgctgaggcacacctcaagctcttcgaattgggatttggcg

SEQ ID NO: 6631 - DNA, 519 bp, Triticum aestivum
  Clone ID: uC-tsro9316120c02b1
tgtctgttggcgccaaaccgggcggggtcatcgtggagagccgtggagctcatcttcctgtacttgggatgtaacattgagctaaggtctgagggtacgtagctgcctgcctgttggtgaaataaatggccagcttgtgttcttgtgagcagaagaaagaatgctagctgctcatctcatctggcttgcttcaagtcatggtattcagttattttttggaaaatgatattccatgtgcctgcttactggagcacacggcgtcgatcatggccaaattaatgcagtgaagttccaagatgtcatcatcaccagagacagaaggagaggagcagcattcactgcactctacaccatgcatcgagcagctcaagatgctcttcaaatgatgagcgcttcttcgccatcgactgtaggatcttcttttgtcccagacttgggtagcaccgtgtgtcgatcggctatgggaagatgaccaaggtggtagactggtagtggtgtattgaatgggtgcagataaaa

SEQ ID NO: 6632 - DNA, 168 bp, Triticum aestivum
  Clone ID: uC-tsro9316120c03b1
gcgtctacgcgtccgcccacgcgtccgcggacgcgtggggtgaatagaaataaaatgatatcaagaataaaaataaaaagtaggcggttgctggtgttgcgagtcatgggtacctatcgtagaaacgaactggttcgctgtcttatagtgtccacgaagttcccttga

SEQ ID NO: 6633 - DNA, 82 bp, Triticum aestivum
  Clone ID: uC-tsro9316120c04b1
gacgtcaatgtgaaccaagagtggctggtgtagttaaattaatgagcttgggcattgctcgatgttactgtgaaaaatgtgt

SEQ ID NO: 6634 - DNA, 167 bp, Triticum aestivum
  Clone ID: uC-tsro9316120c08b1
tcgtccacgcgtccgcccacgcgtccgcgcaacgcagagtccagtagccgagagcaaagcaagcatcagagagcgagagaaaagcaagggttgcatcgggagaggagaaaggagaagcgggccaggatgtgtggcggagcgatcctcgccgagctcatcccgggggg

SEQ ID NO: 6635 - DNA, 54 bp, Triticum aestivum
  Clone ID: uC-tsro9316120c11b1
tcttccacgcgtccgcccacgcgtccgcccacgcgtccgctagttctagatcgc

SEQ ID NO: 6636 - DNA, 388 bp, Triticum aestivum
  unsure (1)..(388): unsure at all n locations
  Clone ID: uC-tsro9316120c12b1
tcgttttcaatctgctctctactaacggacccaaaccctgacgacccgttggttccggagattgcacacatgtacaagagcgaccgtgcaaagtatgagtccacagcgaggagctggacccagaagtatgcaatgggctgaccctggtagccgcgggtggaggatgatgttggagccatcttcgcttgtaacacctaatgtatctttgttcctgttctgctgctgctatatgggattgtactgtccacctgactgaattcaagtgtcatattgtgaagtgatggcaaaaggcctctaatgggtctatgggtgcacccattcaacaaattaatagagatgggaactgaaaaatntatattacattactttctctctctctcttctgaat

SEQ ID NO: 6637 - DNA, 334 bp, Triticum aestivum
  Clone ID: uC-tsro9316120d01b1
gctggcgggcggggcggcatcggcgcccatcgtggtagcggcgccgcctatgccggcgtggacgtcgatggactcgatgtactcggtgtcgccgccgccgagcagcgtcccgatgccgacgtcactgctgctggccgccggcgccgggcggaagaagatgccgaccccgtgcgccgtgcaggtggctggcgggggcgtggacgtcggcgccaccgacgagctccgccgcctgctccggctctagccaccgctgctgttgctgtgtgatgggccgatggcaaggcgagggagctgcggatggatgtagcccgtttatatggatccggggagtttt

SEQ ID NO: 6638 - DNA, 394 bp, Triticum aestivum
  Clone ID: uC-tsro9316120d03b1
gtttcctactaactaaacagtaaacagagagctcgctctccgtgaatgatgtcgaggaagaagaggaagaagaagaagcagtgtggagcacgctgctgctacctggtcatgctctcagcagtgtgaatctccagaagcatgcttgccgtgccttcttccgggtgcaccggaggctggcatgtgagcaggggtgcttcagtgatgcagaagaaaaacggcaagtcttatcggcaagggaaggctacgcctttcttacaggacttcctctcctccattaaatctgcgtttggaggaaggggctaccactttttgtcctatctatatactagccttctcgcttataatgtaaactgtgttcctctcgcacattccgtgctctacttacctttttttg

SEQ ID NO: 6639 - DNA, 316 bp, Triticum aestivum
  Clone ID: uC-tsro9316120d04b1
gctccgttgcccacccacgcgtgtctttcacccggcgatccgactcgtgagagacgaggatataaacaatgctgccgatgttgttcactgaacctgataagtttttgatcgtgcaactgaaagtaacatggccgttcggagccaacgaatttctgaggaggagaccatgaggagagacccaactgtaatgcccgactacgatatctgggtgtacacaggtgccgtgatgacaaactgacggggaccaaagatgatttggcgcagctggcggcttagattgaagaggggcttgctgcctctaggcctaaacttggct

SEQ ID NO: 6640 - DNA, 89 bp, Triticum aestivum
  Clone ID: uC-tsro9316120d05b1
atattaaaaaacaaaaaaaaaaaaaagcgggcgttatataaaatacaaaactaccaaaaaaaacaaaacaaaaaaaaaactataatatg

SEQ ID NO: 6641 - DNA, 76 bp, Triticum aestivum
  Clone ID: uC-tsro9316120d06b1
cattggtgtctgtgaggaccttttacaactgtcatgaccgctagacagctccccttaccccacataatacgcttgc

SEQ ID NO: 6642 - DNA, 51 bp, Triticum aestivum
  Clone ID: uC-tsro9316120d07b1
tcgtagacgcgtgggtgcgagggtaaggtggagggagagaaaaagccctat

SEQ ID NO: 6643 - DNA, 396 bp, Triticum aestivum
  Clone ID: uC-tsro9316120d08b1
tgtatgaaacagcaggatttgaattataatcagttacaggcaactggcacgattgatcctagtaggattcagcagggaattcaagctgctcaagagcgttcttggaaaagttgactgcaggtggatgaatgatgtgtcagccaagactcagtctcaggaatgagctccagcaaagcctgccgcttccgtctgactttttttgccttcgagcggatggccatgttgactcttgcggtcattgtaactctgaatttagcttagattagtgcctagattgtagatcctatgtgtgtaaaatgtttgcagtctaggccttgtatcgctgtaacattgccgattagaatggcagctgtgtatcgctgtaacattccgtgtttttatttaccttttttatgg

SEQ ID NO: 6644 - DNA, 358 bp, Triticum aestivum
  Clone ID: uC-tsro9316120d09b1
tctctgaggtggaggagaaggagtcgggcaaggcggaggagccggagcacgagcagtacgacaaggacgagctgtagttgctgatggtcttgtcatcgcccatttagctctcactagaagtgttggactggaaatgtgatggtttcgagggacgtccatttttaccgcgcgaaaacgcatatcatcgtgatacgaggtttttgtcagtgtaatgtactgtacctagttttgtttttaaaaagttaaatgataccctagctagttcaaattaaaaaaaaaaaaagtataataagaagtggccttcatgtttaatcaacttcaactggtatatatcttcagttatcatacttaaacttcg

SEQ ID NO: 6645 - DNA, 524 bp, Triticum aestivum
  Clone ID: uC-tsro9316120d11b1
tgatttgctttatggtgtgcgatttgagtccttaaccagccatcagatgaccaatacaattcaaaagaagttcaaagtatcatcaactcagctgctgtaccaatcatgcccataccaagcattgaccctgttcattgttggtccattcctggatggatttctgactaacaaaaatgtctttgcttttgcatacacacctcaagttctgttcttcatcgtgctgtcgtgtctgatatcagactcggtgaacttcagcactttccttgtgattgggaagacatctcctgtaacttaccaagtccttggccatctaaagacgtgcttggttcttgccttcggctatgtcttgctgcacgatccgtttagctggagaaatatacttggaatcctgattgcagtggttgcgatgggattatattcatacttttgcacccgtgaagctccaaagcccactgaagcctctccacaagtcattcaggtgaaagaaggcgaatcagaccctttgatcgcagactccttgaacg

SEQ ID NO: 6646 - DNA, 398 bp, Triticum aestivum
  Clone ID: uC-tsro9316120e02b1
tcttcgcgtccgcccacgcgtccgcccacgcgtccgcccacgcgtccgcccacgcgtccgctagctagccatggcatcttccaagagtagtcttgcaatgtttgcactggccatagtcatggccgtggtggctgacgtctcggcgcagaacaccccgcaggacttcgtcaacctgcacaaccgcgcccgcgccgtggacggcgtcggccccgtggcatgggacaacaacgtggccaggtttgcgcaggactgggcggcgcagcgcgccggcgattgccggctgcagcactccggcgggccgttcggcgagaacatcttctggggttccgggcagtcgtggacggccgccgacgcggtgaagctgtgggtggacgagaagcagaactaccatcttgaca

SEQ ID NO: 6647 - DNA, 211 bp, Triticum aestivum
  Clone ID: uC-tsro9316120e04b1
tgcggacgcacacggcgaaggcgttaacgcctctgcgcgtgaccccaaaaactgtgtttatcaccggggatacggcgcgcgagtgcaccatgatttagacagaaccgctgatgctgttgtgtgtccctgtggagagcgtgtgcgcacacatgtggtaatcatgggccttttgggccatagttgttctgtggaggagaccatgtcgaaagag

SEQ ID NO: 6648 - DNA, 82 bp, Triticum aestivum
  Clone ID: uC-tsro9316120e05b1
cttacgcctccgttccgcgagcgcacggtgcgcggggtatacggagtgctggccccggacgcggagcaggctggtgccttcg

SEQ ID NO: 6649 - DNA, 500 bp, Triticum aestivum
  Clone ID: uC-tsro9316120e06b1
cttttgcgtgcgctcctcctctccaacctcgtctgcaacgtaccaacagtgctgctgatggggaacgaggtggcgaccgcggcggctctgatctccccggcggcggagactcggtcgtggctgctgttggcgtgggtgagcaccgtggcgcgcaacctttcgctgctggggacggcggcgaacctgatcgtgtgcgagcaggcgcgccgggcgccgcgcaacgcctacgagctcaccttctggaaccacctgatcttcggcgtgccctgcacccttatcgtcaccgtcgtcggtgttcccctaatccgaaagatgtagccaccctatccatctacgcagcagcgtcctcgtcatcgtcgaccgacgatccaactatatgcaatatacactttccttatatataccagcaggctgtccatatgtacgtgcatacacaagtccatatacaggcactttgttcgtacgtacgtattgtgcatagcctccgctttcgtatgtga

SEQ ID NO: 6650 - DNA, 410 bp, Triticum aestivum
  Clone ID: uC-tsro9316120e11b1
ttggttggcttctcctccccactcagtcctcggttcccggtccggtcccgttccgttcgttagggtttagtagtagcggggaagaggaaggaatggtggacgtcgagtaccgctgcttcgactgcggactcgcctgggccaccgacgaccagtccctccagaacgccttctccaagtacggcgacgtcatcgactacaagatcatcactgacagggagacggaccagatcccgcgggttcggtttcgtcaccttcgcgtcgtacgaggcgatgcgccaggcgatcgaggccatgaacggccagaacctgaacggtcgaatcatcaccgtcatcgaggcgcagtcctgtcgttcctgcggaggatgctgcggccgcttcggcggtggcggtggcagctactgaggccagcg

SEQ ID NO: 6651 - DNA, 79 bp, Triticum aestivum
  Clone ID: uC-tsro9316120f08b1
ttgtgactgatcgttttggcatgccaatgcaagcataatcggtcccaaggaaactagctgaccccttcgactttggtgg

SEQ ID NO: 6652 - DNA, 465 bp, Triticum aestivum
  Clone ID: uC-tsro9316120f12b1
ttcgcttgactccttggaagcagagagaggaggaggaggaggaggaggaggagaccatgtcgtcgtccggtggcaagctcttcaccctggaggaggtcgccaagcacagctccaaggacgactgctggctcgtcatcggcggcaaggtgtacaatgtgaccaagtttcttgatgaccaccctggaggcgacgacgtcttgctgtcttcaactgccaaggacgcgaccgacgacttctaggacgtgggacacagcacaaccgcccgggcgatgatggacgagtactacgtcggcgagatcgacgcgaccacgatacccaccaaggttaagtacacgccgcccaagcagccgcactacaaccaggacaagacccccgagttcgacatcaagaccctgcagttcttggtccccctcgcgatacagagcctggccgtccgcgtgcggatctacaccaagggagactttg

SEQ ID NO: 6653 - DNA, 330 bp, Triticum aestivum
  Clone ID: uC-tsro9316120g02b1
acgtgaactactaccaggaggagtccttctacagcaccaccgagatgagctcctcccccttcatccgagccgaatgagaccgtcgccccctgcccctgccgaaggccagttcctactaatgatgcaccattttttccgccagtcggttccgtacaaaaaatcattcattgattgttggtctgtaaaaaggttaatctgcaggttttttcttcttctgatggatgggatgttttccatgtttgtgccatgcttcttgagacagatagagatggagcatgatttatctgttggtgtgtatctagtgagtggtagtggagtaagttcttcttc

SEQ ID NO: 6654 - DNA, 230 bp, Triticum aestivum
  Clone ID: uC-tsro9316120g04b1
tttgttcagaagttactttctggcatcttatttagtgctgccgttaatatggtcactactatattattggctgggcatatttattagactaatacactaggcaatcattgctgtaggaccttaacctaatgtataatatcaggcgcgttatcttggcagatggttcagacacgtgtgttcatgtcgtggccaggctatataaacattgccttacgcatcgaaaacattac

SEQ ID NO: 6655 - DNA, 484 bp, Triticum aestivum
  Clone ID: uC-tsro9316120g10b1
tctatctttccagttcaccggccgttatggagatgaagcccgccgcgcagccggtcaccggcgtccccgtcggcgcggcgccggccgcctggtcctccggcctcttcgactgcttcgacgactgcggcctctgctgcgtgacctactggtgcccgtgcatcaccttcggcaaggtggcggagatcgtggacaggggctccacgtcgtgcggcaccagcggcgcgctgtacgcgctcctgtgctcgctcacgggctgccagtggatctactcgtgcacctaccgctccaagatgcgcgcccagtacgcgctcccggacgcgccctgctgcgactgctgcgtccacttctgctgcgagccatgcgcgctcgtgcagcagtacaaggagctcaaggcccgcggctacgaccccgagatcggctggcaccttaacatggagcgccgcgccggcgccggcgccgtcaacccgccgggcgttcaggagat

SEQ ID NO: 6656 - DNA, 86 bp, Triticum aestivum
  Clone ID: uC-tsro9316120h04b1
gccacacgcgcgtgtacacgcgggcggccacgcgttcgcccacgcgttctttacacaagtccggcgctagaaccagcgaactccca

SEQ ID NO: 6657 - DNA, 207 bp, Triticum aestivum
  Clone ID: uC-tsro9316120h06b1
gatggttctaggctgtaaatttgaaatctgggttcgggtgcacctgtgatccggtgcacccttgtgtgtgcgtgagaaactgtggcgacgatcgcgttgtactaagcttatgtatttgtgtaactgaattggggtaattgaatcttcattttagcaaaaaaaaaaaaaaaattaaaaaaaaaaatagaacagatgaaataatataaa

SEQ ID NO: 6658 - DNA, 289 bp, Triticum aestivum
  Clone ID: uC-tsro9316120h09b1
tcgtccacgcgtccgggcctggcggcgactgaggaggtgctacgcgccgccacctccacctcgacgcgccgccagatctccacctcgacgcgccaccggtcatctgcatccacgcgccaccggaaactccgccttgaacttcggtttttgtggtgtttccctccagtttgtcatgaaccacagaaggacgcacaggagcagcatctggcattcagagcctgacaggtttcatggttgcacacaagcgatgggtcaaaggagcctgcgaaatatttttggtctaggtaag

SEQ ID NO: 6659 - DNA, 231 bp, Triticum aestivum
  Clone ID: uC-tsro9316120h10b1
ttgtacgcgtgggtgcgcggggtcgcgtgacgcgggctaaataaaagtgttgtcggggccagtcgacgcccagtgtcggtcagcggcagcgagcgagcgagcgacgcagtgcggtgccactctcgccggcccccgtggctggctgcgtctgcttagctgcagctttgtagtggtgtgtgtcacagtgtcagttccacctatgatcgatcggtatcctatccggtttgtgtt

SEQ ID NO: 6660 - DNA, 341 bp, Triticum aestivum
  Clone ID: uC-tsro9316120h11b1
gtgagagtttcttaaaggtgaaaaaaaaggagaggaaggtgaaagattgcgatggggcagccacgacgaagaaacagtgcgatgataacgttgttgttgtagcggtggttggcggtggagaggagatgaggaggatggggtttgtgtctgcttacgtacaactttgtattgttagttgtaacaggggcagtggctcttatggttcaaaggtatcctatgcgtgctgtgtacaaaatattttttttatggtggcacctatataagatccattgttctatactttacaactgctacgattgggaaaactctgtagttacccatcttatttagtttgggcaaat

SEQ ID NO: 6661 - DNA, 93 bp, Triticum aestivum
  Clone ID: uC-tsrow189001a03b2
gcgtccggtcagctgcgcaaacctcaagtacgtgttcttgcacgacatcatcattctagcgaatacgacgtacgttagcgtcgtgacggtgca

SEQ ID NO: 6662 - DNA, 295 bp, Triticum aestivum
  Clone ID: uC-tsrow189001a04b2
ctcgtgggcgctcgtcgcggacgtcccgtgccctgaccgcgccgtggtgctccaagtgcaccacctccccgccgtaccgccgtgcggggcgttcgcgtgggcgccgtcgctcctgacgctccaggaccgtctcaccgaggagggaaagcgcacggacaggcgcaatccctgcgggctactcaaggacatccacgcgctcgtgaagtgcgcgcagaggctcgccgctgtgtgcagcgccatgaaggacggtctggagccgttggaaaggcacgtcccggagggtttccaccgtatt

SEQ ID NO: 6663 - DNA, 262 bp, Triticum aestivum
  Clone ID: uC-tsrow189001a06b2
tccttggtgaggtggaagaagcactcggtattaataaacgggtgatgactgtattttccgaggcgacagttttgcagcgctggaaaccgtagctagggtcgaatgatgtcgccgtcccctgttaattcgtttaggtcgattgatattcttgtactgctagtcatgttctttgccaccgagaaatttgatcggtggctgcgttggtctcttgacattgtaattcgcaagcaatatataggccttttccctcgcgttcaatgct

SEQ ID NO: 6664 - DNA, 368 bp, Triticum aestivum
  Clone ID: uC-tsrow189001a08b2
gacacgtgggagcagagcaccctcaagggctggtcctgcaagactgtttatgatgttacggccagggcggcgttcctggtgaggtgcaaggccaactctgaggccaccctcgggacctacaagggcgacgccacccttgccgagggcgcctcagagagcctccatgtcaaggactacaagtactgatctgccccccgctggatggtttgggcattcctgcttactacctccgtctgaaaataagtgtctgacacttatttttggacagagtagtatctagatggtttcatagtcttgatatctttaaatatcaacccttgtttttaataatataagcttctacttatagttaatttttgacgttgaat

SEQ ID NO: 6665 - DNA, 412 bp, Triticum aestivum
  Clone ID: uC-tsrow189001a09b2
tttctttcccatccctgtggtctgtcctgttgccaaacgctcctttgatccccgtttgctacggcaaggcagcaaacgcgattacgcaagcttaggtttcgtctctccttcctctgtccccgccccacctcgtgccccaccctacctccggcgcgcgacgagcgcgagcaagagcgcttggtagatagatcccgatggcctcgcgacgccagacgctcctcaaggtcatcatcctcggcgacagcggggtcgggaagacgtccttgatgaaccaatatgtgaacaagaagttcagtaaccagtacatggccaccatcggcgcggatttcctcacgaaggaggtgcaatacgaggacaggctcttcactctgcagatatgggatactgctggacaggaaaggtttcagagtct

SEQ ID NO: 6666 - DNA, 261 bp, Triticum aestivum
  Clone ID: uC-tsrow189001a10b2
gtccgcccacgcgtccgtgtactgagtctactgtaccagggcagtcccttctccctcccctcccctccgttcgctcgccgtcacgtccccggccgacccctcgccgccggaccgcatctcctgccctaacctaccacctgcagatccgcgcgctccccgaccagcgtcggcgggaactttcctgcgagcttgatccatccagtggccggcgacagcgaccgaccgccgcgcggatcgatccagcgaccaacctggagcacg

SEQ ID NO: 6667 - DNA, 279 bp, Triticum aestivum
  Clone ID: uC-tsrow189001a11b2
cgcgtccgcccacgcgtccgcgaagaggagaaaggttccatgtgaacggcacttgcacatgggtaagccgatcctaagggacggggtaaccccggcagatagcgcgatcacgcgcatcccccgaaagggaatcgggttaagatttcccgagccgggatgtggcggttgacggcgacgttaggaagtccggagacgccggcgggggcctcgggaagagttatcttttctgcttaacggcctgccaaccctggaaacggttcagccggaggtagggtccag

SEQ ID NO: 6668 - DNA, 275 bp, Triticum aestivum
  Clone ID: uC-tsrow189001a12b2
gcgtccgaaaaatctacacaaagatgcggaggattatcctgcccttatcccccacctcccgtttctgctcccgttcccaccccaatcccctccaagaaaccctcgcccccctcgcctcgccgccatgggcagcgccgcctcgccgccgcgggccctcgacgcggcgacgcaggaggacctcaagcgcgtctccgtgcaccgcgccgtcgacatggtggagtccggcatgacgctggggctcggcaccggctccacggtcgcgcacgcgctcgacc

SEQ ID NO: 6669 - DNA, 301 bp, Triticum aestivum
  Clone ID: uC-tsrow189001b01b2
ctcccgatcctgtcctgcggctcaccccctcctctcccctgaaccaaggacgacggagatccagtcctcaccccacgcgggaacccttcctcccacccaccgccgacctcgccgtcctcctcacccaccgcccacctagtccctccctcccctgaccatctctccctaccctctgcctgcttcccctgcctcatccccagatccaatcgacacaaccccgctgcccccgcaccccgtactgtccaccatggccgactgctcctcctccccgcaccaacccatcaccccgtcgtgggggcgc

SEQ ID NO: 6670 - DNA, 344 bp, Triticum aestivum
  Clone ID: uC-tsrow189001b02b2
ttgtttttgggtttgttcactttgctgaaagatcaagtgctctgaaggcagtttaaggaagtgaaaaatacgaaatcgatgggcaagtgcttgaagtttccatggccaaacctttgagtgataagaaacctgaccactcgttcaagcctggtggagctcccagctatcctcttccaccttatggtggctacatgggagacccatatggtgcctatggtggcggccctggattcaaccagcctatgatctatggtagaggaccagcaccagctggaatgaggatggtgccgatggtgctccctgatggtcgccttggctatgttctgcaacaacctggtggaatg

SEQ ID NO: 6671 - DNA, 439 bp, Triticum aestivum
  Clone ID: uC-tsrow189001b04b2
ttctttattcagtttttgacaatgaagaaaatcaacatgtgcttgtgccgctcgtgactgggatggccgaatctggagctgtggaagaagggaagttcaggtactacaaattttctgtcgaggaaggtgtggctgagaaagttgcgtctggttgtgcaaatattgaggtaaagatagagtctgatacaagtggcggtgacactgatatttatgtttcaaggcatcctttagtattcccaactcagcaccgtcatgagtggtcatctcatgagatgggatctaaggttcttatactcaaaccaaaggatgctactttggtcagtggcctttacagtgttggggtttacggtttcaaggccacagcgaagtttcaactttctgtagctatcaaggatgttattgatagccataggattggtgagcagggtagtgtgtcatc

SEQ ID NO: 6672 - DNA, 366 bp, Triticum aestivum
  Clone ID: uC-tsrow189001b05b2
gccaagcgcaagctccgcggcttcggggccgttaagaactgttttccccttatgccccgcctcgcgtggcactcggccgggaccttcgacgtggccaccaagaccggcgggcccttcggcaccatgaagtgccccgcggagctcgcgcacggcgccaacgccggcctcgacatcgccgtcaggctgctcgagcccatcaaggagcagttccccatcctctcctacgccgacttctaccagctcgctggagtcgtcgccgtcgaggtcaccggcgggcccgaggttcccttccacccggggagacaggacaagcccgagcctcctccagaaggccgtcttcctgatgctacccaaggctctgaccac

SEQ ID NO: 6673 - DNA, 407 bp, Triticum aestivum
  Clone ID: uC-tsrow189001b06b2
tttctcaggttattgggtcaatgttaggccccgggcggcgatttcatatgagcgaaatatgaaatcaataggtactctattttcctttaacattagtttctgtgactggttcatgtgtgctgagctcctgtatgtgaacatatatgcaaaccatgtgtattagtttctattactactatgttaatgatggcagtttagatatccctgtgttagataattatcatatctagaagatgatcaaattttcttgattcatttgtagctcattgttggattatgctgctgctgctggagatggacatgctgttaaatattttcctggagcttgaaatccttgaagtgcttaccatgtttttttttgaaatggaagtgcttaccatgtactctcttttataaactaaatacct

SEQ ID NO: 6674 - DNA, 346 bp, Triticum aestivum
  Clone ID: uC-tsrow189001b07b2
actccgtggccactgccccagacggcggcatggtttacgcggtttttgcgttcattaccgccggtatccagcatggcttcttcgagctgcagcccaaggaagggcttgccatggtgaacggcacagcagtgggctccgggcttgcatccatggtgcttttcgaggctaacatcctcagcctccttgccgaggttctatcagccgtcttctgtgaggtcatgaacggcaagccggagtacactgaccacctgacacacaagctaaagcaccaccctggacagatcgaggctgccgccatcatggagcacatccttgaaggaagctcctacatggcactcgcaaagaa

SEQ ID NO: 6675 - DNA, 400 bp, Triticum aestivum
  Clone ID: uC-tsrow189001b08b2
ttttcctgtcagccgtcttctgcgaggtgatgaacggcaagttcagagtacacctaccactttacccacaaattgaagcatcaccccgggcaaatcgaggctgctgccatcatggagcatatccttgaaggcagctcctacatgatgctggcgaagaagctcggtgagcttgacccattgatgaagccaaagcaagataggtatgcactccgcacatcgccgcagtggcttggccctcagattgaggttatccgtgcttccaccaagtcgatcgagcgggaaataaactccgtcaacgacaacccactcatcgacgtctcccgtggcaaagctatccacggtggcaacttccagggcacacccatcggtgtgtccatggacaacaccaggcttgccattg

SEQ ID NO: 6676 - DNA, 393 bp, Triticum aestivum
  Clone ID: uC-tsrow189001b09b2
tgtagaggcgagacgcgaccgaaagaggagagagccatcttccatgggtggttggcgtcatgcgcaccgccgcgaaggtcggcctcgctgggggcgccgcggcggcggcgggacgcttccgcaacgtcgccccgtccttcgccacggcccccgccgccgaggccgccgcggcggcgccgctgctgtccgcggccggggagatccccgcggtggcgccggccgggtcgcagtgggcgtcctgggaggtggacgactgggagttcgcggactggaggtccgagtcggcgtccgaggcggacgtggcggtggtcggggggccgaggctggtgttcgccccgccgtcgcgggaggaggccgaggaggccaccgccgagctccgggaagctattgaca

SEQ ID NO: 6677 - DNA, 332 bp, Triticum aestivum
  Clone ID: uC-tsrow189001b10b2
tatacacaatgaccctctccaagtcgctggcgcttttcaatcttttgttcagcttgtctccttgatggcgctccctatgatgatggagatcggtctggagagagggttcaggaccgcgttgagcgactttgtgctcatgcagcttcagttagcgtccgtcttcttcacattctccctcggaaccaagactcactactacggaaagacgctgctccacggaggagccgagtacagagccaccggacgtggattcgtggtgttccatgccaaattcgccgagaactatcgactgtactcacggagccatttcgtcaagggcatcgagctgatga

SEQ ID NO: 6678 - DNA, 424 bp, Triticum aestivum
  Clone ID: uC-tsrow189001b12b2
cacgcgtccggacggttgggaattcaaggccgcgccctcctctgatgccggccaggatggagccggacaagcggacggaggtggaattgagggtatgccaaaatcattgggcagcgaccagaaagattggtcactatttactggtgtcaataatgaactgaacctccagactacagatcatgtcagaaatcatgagtccacaggacaaagtgtgaagaccttcagctattctccagataatagttcatccatactcaacttgtacaaagaatctaaatttgtcgatgctgttcacgttcctcaaagttgttccgaaagtgtagtcagctcttctgatatgttctctagcaatgaagtgatgaaaaccattccattaaatcaggaagcgacaatattttggttgatttctaccataagctgagag

SEQ ID NO: 6679 - DNA, 382 bp, Triticum aestivum
  Clone ID: uC-tsrow189001c01b2
tttttcacccgcgccatctcctggcgccgctgaccgcctcctcccggcgcgcctccgccccaccttgccttctcctggcgagtccttgccccgactccccccaatgaactgcccccgcctcctcctagcgtcgccgcccctgcatcctcctggcccgcagctgatctcgcctctttccgacgagagtccaacccgcaactattcgtcgcgctgccttttccatgtcggccgcctccttctcccccctccactacgcgccactgccgtcgcccatgcgcggcctcgatccggtgccgtcgcccaccactaccaagaccccggcccatcgccgcccaccagcacaatgcccctctgcgcacgaatccgaccttccctctgctcc

SEQ ID NO: 6680 - DNA, 421 bp, Triticum aestivum
  Clone ID: uC-tsrow189001c02b2
tttgttatcacacaacagagcggcagcagttcccgggccgttctcgccccgttcggcgccatggacttcgtcttcgtggagaagctcctcgtgggcctcctcgcggccgtggtgggcgccatcgtcgtgtccaagatccggggccgcaagctgcggctgccgccgggccccttcccggtgcccatcttcggcaactggctgcaggtcggcgacgacctgaaccaccgcaacctggcggcgatggcgcgcaagttcggcgaggtcttcctcctccgcatgggccagcgcaacctggtggtggtctcctccccgccgctggcccgcgaggtgctccacacgcagggcgtggagttcgggtcccgcacccgcaacgtggtgttcgacatcttcaccggcgagggccaggacatggtgttcaccg

SEQ ID NO: 6681 - DNA, 313 bp, Triticum aestivum
  Clone ID: uC-tsrow189001c04b2
tctccctccctctcctcctcccccctctagcaatcggcgagcgatggcgtgggcgacacggttcctgtctgcggtgtgcttcttcgcggcgggcgtcctcttcgccccagatgtcctcgtcggcgaccgctccggctccggcgccaccgccgtcacggccgccaaggtgtcccacctcctctgcttcgccacctgctggggcgctgcgctctgggctaccttcatcggcggaatcatcatgttcaagaatctgccgaggcaccagttcgggaacctgcaggggaagatgttcccggcctacttcacgctcatc

SEQ ID NO: 6682 - DNA, 327 bp, Triticum aestivum
  Clone ID: uC-tsrow189001c05b2
ttcttaaaaaaaagatggcccggtggtcgtcgtgcatggcgctgctcgtcctcgccgtcgccgcgcagctcggcgcgtccgacctgtcgccgggctactacggcagcagctgccccagcctggagagcatcgtgcgcggcgtggtgacgcagaagatggacgacaccatccgcaccatcggctccaccatccgcctcttcttccacgactgcttcgtcgagggctgcgacgcgtcggtgctgatccggtcgacgccggggaacccgacggagatggacgccgacgacaacaagtcgctggcgttcgagggctacgagacggtgagga

SEQ ID NO: 6683 - DNA, 405 bp, Triticum aestivum
  Clone ID: uC-tsrow189001c06b2
tttgacgcgtgggttgaagacttgctttttatatctaagtatctttccagaagaccataaaattagcagagatcggttgataagaagatggatttctgaaggctttatccaagtaaaagatgaaactgatagccagcttgagcttggagatagctacttcaacgagctagtaaacagaaacatgatcatgccgataaacatacatgctgatggtagggttgaagcttgttccatacatgatatcatgctggatcttatatatgaattagcaagtggagagaactttgttactatactggatgttatcaaggaagacacacctttggaaagaagttccgcagattgtccctccagaagagcatgacaggtctcaccaatgctcatatggctaccacaagcatgtca

SEQ ID NO: 6684 - DNA, 341 bp, Triticum aestivum
  Clone ID: uC-tsrow189001c07b2
agagctttgagcgaaggggttttttcaacattttttatcacctttcccgcggcgatccttgtcctcctggccgtcctgttcacggggatcctcgcccagccatcgggctatttccccaagtgctgcgacaactgcaggtccttctcagggatcgacgtctgtgacgacgcccatcctgagtgccccaagggctgcttgcagtgccgcgtggtgcagacgagccctaccaagacgttcaggtgcgccgactaccgcggagactccgacgacacgtgcggcccgccctgcaagaaaaactgatgggttaagatcagatcacgaaatgtttcgcccaaaataag

SEQ ID NO: 6685 - DNA, 410 bp, Triticum aestivum
  Clone ID: uC-tsrow189001c08b2
gcgtccgcaggcaggcaggctagccgggctccttcccatctcttctcttctctcctctcccccgaagagtcaaagacacagggagagagaggactcctccgcatctgcatccgcgcacacgaattcgagagggagaggagcgataatggggagggctccgtgctgcgagaagatgggcctcaagaggggcccctggacgccggaggaggacaagatcctggtcgcccacatccacagccacggccacagcaactggcgcgcgctgcctaagcaagccggcctgctgcggtgcggcaagagctgccggctccggtggatcaactacctgcggccggacatcaagcgcggcaacttcaccgacgaggaggagcagtcaatcatccagctgcaccagctgctcggcaacagat

SEQ ID NO: 6686 - DNA, 364 bp, Triticum aestivum
  Clone ID: uC-tsrow189001c11b2
tttacattgttaggtcttgcaagtgaagctaggagacagaaaccatgtttgtttcctgtgccttggctgcactgcttgctgtggtggtactcgtggtctgctctccggcgcctcgtgttctcgccactgaccccacccagctccaggacttctgcgttgctgatataatgaaccctgtgattgtgaacgggttcgtgtgcaagaacatgaagatggtgacggcgaacgacttcttcttgcccgggcttaacaagccgggcaagttgaacgctcagggctcggcggtgacaccggtgacggtgcggcagctgccagggctgaacacgctgggcatctcattggcgcgcatcgacttcgggcccaa

SEQ ID NO: 6687 - DNA, 330 bp, Triticum aestivum
  Clone ID: uC-tsrow189001c12b2
acttttcttccttgattaggtctgtaagctcttcatgggcgttggtttactcgttgaagctcgtggtgctgctcgtcgctctcatggtggccatggcggtcacgggccaaaactcggagcaggactccatggacacccacaactcggtacgcgccgacgtgggccttggggaggtgacatgggacgctacggtggcagccttcgcgcaggactacgcggatcagcgccgcggcgactgccagctgatccatactcctgatggccggccgtacggggagaacctctactgaggcggctggaccgagtggacagcgacggacgccgtgaatt

SEQ ID NO: 6688 - DNA, 316 bp, Triticum aestivum
  Clone ID: uC-tsrow189001d01b2
ttcttcgcgtccgcccacgcgtccgtagagagctctcctttccatacctcttccttcgctccaccaggagtctagggttagagagagagagagagagcgagacgagcaaaaacaatctctcgccccactgttataccaagttcgcatccatctcactgttatacatccttgtatcacaatgggtggcctatccatggagcacccttgggcattcgccttcggcctactaggcaacgtgatctctttctcgagccttctggccccgataccaacattctaccggatcttcaagagcaaatccacggaggggttccag

SEQ ID NO: 6689 - DNA, 374 bp, Triticum aestivum
  Clone ID: uC-tsrow189001d03b2
catgtcaaatgagctgtacaacacgatggcttgtttgactgattgtttttatgatggaatcgcaattggtggggatgttttccctggctcaactctttcagatcacattctgcgttttaacaacataccccaggttaaaatgatggttgttcttggggagcttggaggaagtgatgagtattcactcgtcgaagccttgaaacaaggaaaggttcagaaacctgttgttgcttgggttagtgggacatgtgcacgcctattcaaatctgaggtccagtttggccatgctggtgcgaagagcggcggcgagttggaatccgcacaagctaagaatcaggcactaagggatgctggggcagttgtcccgacttcat

SEQ ID NO: 6690 - DNA, 381 bp, Triticum aestivum
  Clone ID: uC-tsrow189001d04b2
tcttttaacgtagggaagcacaagcacactgcagcagggctctcaccgtctttagctccgtctaccaggccgtgctggacgccgagcacgagctctgggcgaccacattctcctacatcaagtccatggcgctcaagtcggcccttgacctccgcctcgccgacgccatccaccaccacggtggcgccgccaccctccctcagatagccgccagggtcgcggtgcacccgtccaagatcccctgcctgcgccgtctcatgcgcacgctcaccgtctcgggcgtcttcagcgtcgtccagcagcaggacgtcgtcgttcctgctgcccccgtgagcaacggcagctgcaacggcgccgtcgtcgccgagcccttgtacgccc

SEQ ID NO: 6691 - DNA, 407 bp, Triticum aestivum
  Clone ID: uC-tsrow189001d05b2
ttgtttcgcgtgggggaagcgcaggtgcctccctctgtcttcctctgcgactcggctgcttcttgacttgcaggacgaggtcggacgacttgggttgcattggttttggcaagaaggaaggaagaagatggtcatgaggccgctgtggcacgcggcgccgcctatctagtctctgccccttacgtacctccgtgatcacagcagcttcatgcctcggtgaggtccctaatttgtaggaccaagctatgattctttcttacctatgtctgcaagctgttcgatgaaaatacaagcgagctacaaggaaagattcatctatgtaatatccaagctttgttgtctgcttaataactttttctgagatttagttacattcaacgatgacttgcatgtactacattataata

SEQ ID NO: 6692 - DNA, 372 bp, Triticum aestivum
  Clone ID: uC-tsrow189001d06b2
ccgggggacgagcggcaggggctcgcgaggctcaaggactacctcagccgcttcggctacctccccgcgccgccggccaagttcaacgacatgttcgacgccgacatggagtccgccatccggacctaccagcagaacttcggcctggaggtcaccggccagctggacgcggccacggtcaccaagatgatgtccccgcggtgcggcgtcgccgacatcatcaacggcacctccgccatgggcaagacggtccacggccggaacctctactcctacttcccggggtccccctcgtggccgcgctccaagaagagcctcaggtacgccatcacggcggccaccgagacgaccatcgaccgggccacgctgagc

SEQ ID NO: 6693 - DNA, 341 bp, Triticum aestivum
  Clone ID: uC-tsrow189001d07b2
cgcgtgggcggacgcgtgggcggacgcgtggtgcgtcttgcgtttggcggcggctgccagcagacggagcccaggccggaggaggccccggaccccgattcctgctcccaatcgtctcggcgagagaggcaacggagccactatgcctggagcagatgagacgtttccggcagagtcgagggcgacggtgttctttggggctgtgacatctaaatcggagccgctgacctttgaagagtccctcagatttgtcaagaaagtgaaggctcgcaactacatgctgtacctgtcgctgttcgacatcctgggcaggacggagctgtcccagctggaggcctacc

SEQ ID NO: 6694 - DNA, 327 bp, Triticum aestivum
  Clone ID: uC-tsrow189001d08b2
ggcagcagcagccatggggaggcttgttcgacttcgttgtgcgattcctgcagctggcgcggccgggcaggggccatggtcagggacagccggcgcgggtgggggtcgcggtgaggggcggcagggcggcggcgcgcggggtgcggtgccgggccggcggcctgatcgagccggacgggggcaggctggtggagctggtggcccccgaggagggcggccggcgggcggcgctgcgccgggaggcggcggcgctgccgcaccgcgtgcgcctgggccgcgtggacaccgagtggctgcacgtgctcagcgagggctgggccagcccgc

SEQ ID NO: 6695 - DNA, 272 bp, Triticum aestivum
  Clone ID: uC-tsrow189001d09b2
ccacatggaggaagtcatcaggttctttgaaatgcatcacaaggggaaatataaggtgtataacctttgctcagaaaggctgtacgatgcatctctttttgagggaaaggttgcatgctttccttttgacgatcataattgtcctccgatacaacttgtcatatcattttgccaaagtgcatactcatggctgaaggaagacataaaaaatgtggtggttatccattgcaaagctgggaaagcaagaacagggttgatgatctccatccttc

SEQ ID NO: 6696 - DNA, 360 bp, Triticum aestivum
  Clone ID: uC-tsrow189001d10b2
ttacactaagattatcaggaaaggattcagaggtttttcttaatccatattaccactcatgacgcaaaattaacaaccacgagtttgaaatacggataatggtgcttattatgtgctagaaatcaaatatgaaaaggagaagataatgtttgcgaaggagaggggagagacatacaggttgattctgggtaaactttgcttaatttgttggagaaaatgctcgatagatctcatggatggacgaggttgtggcactagttctcggctgcaatatctatcttgatcgattagggcacattagaagcggaagaagaggaaacatttggggtgtgtatggcattgaacattgagtgcttctgt

SEQ ID NO: 6697 - DNA, 351 bp, Triticum aestivum
  Clone ID: uC-tsrow189001d11b2
tcttttcggagggtcggccggcgaagccgcgccggaccccatgatggcggtggccgggcggatctgacgcactgctcggcggggcgcctcgtcaagcttcggctcccctgccggccgccctctgccagccgtgccctgcgccagcacgtccccggcggcctcgtacaccccagcccccgcctgacctcccttccaccggccgctgcgagctcctgccgccggcaaggtgcctccgccttcccccgtctccgcgtcagatctgtctgtcctgccgccggcatcctctctgctgacggcgccggacccgggattggggatggcgtgctcctttgctggtgtcgggcagtcctt

SEQ ID NO: 6698 - DNA, 326 bp, Triticum aestivum
  Clone ID: uC-tsrow189001d12b2
tcccacgcgtccggcagatcttcgtcaagaccctcacggggaagaccatcaccctcgaggttgagagcagcgataccatcgacaatgtcaaggccaagatccaggacatggaggggatcccgccggaccagcagcggctgatcttcgccggcaagcagttggaggacggccgcacccttgccgactacaacatccagaaggagtcgaccctccatctcgtcctcaggctccgcggaggcatcatcgagccatccctgcaggcgcttgcccgcaagtacaaccaggagaagatgatctgccgcaaatgctatgcgcgcctgcaccct

SEQ ID NO: 6699 - DNA, 359 bp, Triticum aestivum
  Clone ID: uC-tsrow189001e01b2
ccgctggagtgtggtcaagcgggggggggatgtccaggtgcttgttgaatcaccacacaaattccaaaatgcacttgaagctgtgaagactctaagagcagagcccaaggccaatgatcagtatttgcccccatttgtgatagttgatgagagtggcaaatcggttggtcctatagtagacggtgatgcagtcgtgactttcaatttcagagctgatcgcatggttatgcttgcgaaagcactcgagtttcctgattttgataaatttgaccgtgttcgtgtaccaaaaattaagtacgctgggatgcttcaatatgatggtgagttgaagcttccaagcaagtaccttgtttccccac

SEQ ID NO: 6700 - DNA, 431 bp, Triticum aestivum
  Clone ID: uC-tsrow189001e02b2
catggagttcgacgagcgctgcctcaaggtccagttgcccaaatttgattgcctcctctttgacctcgacgacactctgtacccgctgagctcggggatctcatcacacgtcaagaccaacattgaagcttacatgattgagaagctgggtattgatgagagcaagatcgaaaaccttggcaacctgctgtacaagaactatggcaccacgatggcgggcctcagggcaattggctacaacttcgactacgatgagtaccacagctttgtccatggaagactgccctacgacaacatcaagccagaccccgttctgaagcagattctcaagaacatgcgcatccgcaagctcattttcaccaacggtgacatgatccatgccgtgagagccctcaagaggctgggcctggaggactgcttcgaggggatca

SEQ ID NO: 6701 - DNA, 290 bp, Triticum aestivum
  Clone ID: uC-tsrow189001e04b2
ccaagtgcggcaccgttggcatccagggcatcgcctggagcttcggcggcatgatcttcgtgctcgtctactgcaccgccggcatctccggcggacacatcaaccccgcggtcaccttcgggctgttcctggccaggaagctgtcgctcaccagggcggtattctacatggtcatgcagtgcctgggcgccatatgtggcgccggcgtggtcaaggggttccagaccacgctgtaccagggcaacgggggcggcgccaactccgtcgcgccggggtacaccaaaggggac

SEQ ID NO: 6702 - DNA, 350 bp, Triticum aestivum
  Clone ID: uC-tsrow189001e05b2
cattccacgagcagatcgacaggggcgggaatttcttgattatgtttctacctttcaccgatgaagagtagcacgctggtggcgatcctggtcctccaggccgtcatggtcatggggatcctcgcacactcacaggcagcggacacggacgacgatttccccaagtgctgcgaccactgcaactcctggtcgggggcccagttctgcgacgacgtcggccccaagtgccgcgacggctgcgtcaactgccgcgtggtgcagacccgccccgtgaagacattccggtgtggagatggacgctccgcctacccatacattccctgcccgccgtcgtgcaaaaagaactgatc

SEQ ID NO: 6703 - DNA, 404 bp, Triticum aestivum
  Clone ID: uC-tsrow189001e06b2
tctccactccacttttgtacgaagaacactatttaaatatggcttcccagatcaacacggaggtggatgccctggtggagaagatcaccggcctccacgccgccatcgccaagctgccgtcgctcagcccatccccagccgtcgacgcgctcttcaccgagctggtcacggcctgcgttcccccgagcccagtggacgtgaccaagctcggcccggaggcgcaggagatgcgggagggcctcatccgcctctgctccgaggccgaggggaagctggaggcgcactactccgacatgctcgccgccttcgacaaccctctggatcacctcggcatgttcccctactacagcaactacatcaacctcagcaaactggagtatgagctcctggcgcgctacgtgccc

SEQ ID NO: 6704 - DNA, 356 bp, Triticum aestivum
  Clone ID: uC-tsrow189001e08b2
tgccaatttattaattggcgatggtcaagtcgtgaagattgcagattttggtgtctctcgtcaacgatcgcaagagggagatatgactgccgaaactggcacctacagatggatggcacctgaggtgataaaccataagccttatgatcacaaggcagatgtcttcagcttcgctattgttctatgggagttggtcacttcaaaggtcccgtatgagaacctgacacccttgcaagcggcactgtcagtaaggcagggacttcgcttggtgattccctcgggcgtgcatccaagaatatctaaattgattcaacggtgctggggcgaaaaccccaatacacgacctgttttctctg

SEQ ID NO: 6705 - DNA, 390 bp, Triticum aestivum
  Clone ID: uC-tsrow189001e10b2
gacatccacgactggatcattttccaccgtttttgggtttttagcactgcatttgatcctgtcttattctgcagcaacgagtttcgaggtactggcgcggatcgcgttggtgttgccgcgcaggtcggcgcagaattcttccatggacgcggtgatcttctccaggtagtccttgatggacggatccatcgcttcaagttggagacgaacctgccgcacgccgcgggtctcgatgaattgcgccagatcgaactaggggaaggagtggtggctggtctttgataccagatgtgaggagctagatatggcggtgcctcgattactcacttgctcacgcaatatcggattcgagtctcaattacagttgctatacaagaatggagaaagggg

SEQ ID NO: 6706 - DNA, 404 bp, Triticum aestivum
  Clone ID: uC-tsrow189001e11b2
ttttcttcacgcgtccgaaagcatgctgctggaacctacaaaagcctggtattttaccttgaagcctgtgaagctgggagcgtatttgaggggcttctgccaaatgacatcggtgtctatgcgaccaccgcgtcgaacgcggaggagagcagttggggaacgtattgccccggcgagtaccctagccctccgtcggaatatgacacctgcttgggcgacctttacagcatttcttggatggaagacagtgatgtacacaacctgagaactgaatctctcaagcagcagtatgacctggtcaagaagagaacggcagctcaggactcatacagttatggttcccatgtgatgcaatacggttctttggacctgaatgatcaacatctcttcttatacatcgggtc

SEQ ID NO: 6707 - DNA, 156 bp, Triticum aestivum
  Clone ID: uC-tsrow189001e12b2
ttttcttcaggcctgatggctaaacccatgtcacgggtgtatacctgaacttgggaggtgctcacggctcctgtacgtgtgcacactgttctgatctgcacccagcatgatgagactgacaccaatgatgagattgctgcagacctcaaggagcat

SEQ ID NO: 6708 - DNA, 325 bp, Triticum aestivum
  Clone ID: uC-tsrow189001f01b2
tttgaggcttttggcaggccggggacgatggcgccgctgctcaaggacgagctggacatcgtcatcccgacgatccggaacctggacttcctcgagatgtggcggcccttcttccagccgtaccacctcatcatcgtgcaggacggcgaccccacgaggaccgtcatggtgcccgagggcttcgactacgagctctacaaccgcaacgacatcaaccgcatcctcggccccaaggcctcctgcatctccttcaaggactccgcctgccgctgcttcggctacatggtctccaagaagaagtacgtctacaccatcgacgacgatt

SEQ ID NO: 6709 - DNA, 217 bp, Triticum aestivum
  unsure (1)..(217): unsure at all n locations
  Clone ID: uC-tsrow189001f02b2
gtccgctttcattaacattncatggacaggaccttatagaggtttcagaattggcgcccaactacgggaggcggtatggtttgctcggcttaaatggttgtgggaaatctacccttctcaccgcaataggctgcagggaactccccattcctgaacacatggacatacatcatcttactcgtgagattgaggcttctgacatgtctgcgctgcaagc

SEQ ID NO: 6710 - DNA, 385 bp, Triticum aestivum
  Clone ID: uC-tsrow189001f03b2
ccggccaccataggctcgcctcgccggcttgtttccaagagctttgagaaggttcgcgcttcttggggcttacttcctgggtcttgctgccgtgccgtcctccattccttgcttctcttctctcgtcgatttcttcgcctggactttcctctctccacctcggtgatttgcggcggagcggatcgagagcaggagtgaacaggggcgcataagcatcgtcattcaacccaagggtgtagagagctagctaactcgaggaatggatcgccggagctggccgtggcgccgcaagtccatctcggacaaggcccccgcccccaccgaaaccgacagctccgcctcctgcccatccgagactttaactgatgaacaggataccaccctc

SEQ ID NO: 6711 - DNA, 372 bp, Triticum aestivum
  Clone ID: uC-tsrow189001f04b2
tttgtcataacttgggacgctattttgagaaatcaacgattgattccatgcccctggatcattcaaaagagcatatcggaactaccgtccagcatttgattagcttggctcaaaacacttctgagctttaccatgaattgcacgcgctggataggtttgagcaggattttcaaaggaaatttcatgaagaggagtctgtaccagcagccaggcgagagagcgttatgatattgcacagtgaactaaagcgccaaaggaagcttgtgaaaactttgaagaagaaatccttgtggtccagacctttggaggatgttgtggaaaagcttgttgatatcgtcacttttctggataaacaaatccgggatgcattcg

SEQ ID NO: 6712 - DNA, 258 bp, Triticum aestivum
  Clone ID: uC-tsrow189001f06b2
caggtgcgtggcggcgctggaggaggccggcgtcgagtacgagctcgtccccatcaacttcggcaccggcgagcacaagagccccgaccacctcgccaggaacccctttggccaggtgccagctttgcaggatggtgacttgtacgtcttcgaatcacgtgctatttgcaagtatgcgtgccgcaagaacaagccagagctgttgaaggagggcgacatcaaggagtcagcaatggtggatgtgtggctcgaggtgga

SEQ ID NO: 6713 - DNA, 348 bp, Triticum aestivum
  Clone ID: uC-tsrow189001f07b2
ttcctctcaagctcctcgcttgctcgcctccctttttgaccggttggcagctgctggagcccgaaaatccaagaaaagcagcgggtcaagaaagagggaaagcaagcgaggagggtgatgatgatggctataagtcgccccatgattcaccgtatcatcccgtcgcctgcgcgcctctgctaaaagggcctcgccgtccgtgtacgctccagtgagcggtggaagagcgtgcggttgcttcgcgcagacggtcggacgccgccgctgcaatgccgcagtaccaggagctgccctgcggcgggcaggtgctcgacatcaacgccgcgctcaaggatggcatcctggggt

SEQ ID NO: 6714 - DNA, 384 bp, Triticum aestivum
  unsure (1)..(384): unsure at all n locations
  Clone ID: uC-tsrow189001f08b2
ctcaccaacctcctaccagccggcgaggttgtttctctcagtgccggagcttcacgacgcggntctcttatctgttcggggtcatccatccgacccccggatccgccgcaaagacggtgcctttctggttgttctcggcactatccatggatgagggtttagcgcgacggcagtgaggtcagcgtgtggagttcctgggttgaattgttgcagcgagaggctttgggaaagggcgcacggcggcgagatgcggggttccgagatgcggaggcgggcaccagagtaccggcggcagtcgcggcggcggctgccgggatggatctggtggctcgctgggatcttccttgtggttgggctcatgctcttcgttctgcaccacaacca

SEQ ID NO: 6715 - DNA, 467 bp, Triticum aestivum
  Clone ID: uC-tsrow189001f09b2
ttccacgcgtccgcagaggcgcagacccagaggagcgcttttaccggaccgtgaagaggctgacggcggcgatgggcggcggaggcgcgcacggcggcacgacgtacaagggctacaccatcccccacaacaagcgctggcacaccatcgccggcaagggcctctgcgccaccatgtggttttggattttctacagggctaagcaggacggcgctgtgctcttgggtatgcgtcatccttgggatggccatgatgatcacgcgcatggtcatggacatgcacacgagcatgaggcttcatcgtcgtcatcgccgtcccattgagctcaacgctgaaagcggctgacagagaccctgacacgtcgcatgtttcgacgcaagtctctgctaataaaaaacaatcacaactatcattgttcacccctgttgtttgcgagtatatttttttttggcacacaaactggcttt

SEQ ID NO: 6716 - DNA, 413 bp, Triticum aestivum
  Clone ID: uC-tsrow189001f10b2
tctgacgcgtgggtttcaggactataccgccaagctatcttacttcggcctcgccaaggatgggcccaacggcgacgccacccatgtcacgacacgtatcatggggacacatggatatgccgcaccagagtacatcatgacggggcatctgacggctaagagcgacgtttatagcttcggcgtggtgctcctcgagctattatcgggccggcggtccattgaccgtgctcggcgttccagggagcaaagcttggttgactatgccagaccgtacctcaagaagcaggacaagctgcaccgggtcatggatccggctttggaatgccagtactcgtgtcagggggctgaactggccgcacgagtagcgtacaaatgcttgagccaaaactcaaagtcgaggcccaccatgaaag

SEQ ID NO: 6717 - DNA, 467 bp, Triticum aestivum
  Clone ID: uC-tsrow189001f12b2
ttttcgcgcgcgcgctctcacgggctcggatcgggaggactagggttcgcgagctgctgccctccggcggtctccacggcgttggcgtcggcggcggcggcggagaagagaaagagggatggaggggctcctgcacaagctcaaggggctcgacgcctaccccaaggtcaacgaggacttctacaagcgcacgctctccggcggcgtcgtcacgctcctctccgccctcgtcatgctgctcctcttcgtctccgagaccaggtcgtattattattcagcaaccgagactaagttagtggtagacacatcaagaggagaaaggctaagagtaaattttgatattactttcccgagtattccttgcacccttctcagtgttgatacaagggatattagtggcgagcagcaccaggacattaggcatgacattgaaaagaaaagattggactcacatggtaatgtcattg

SEQ ID NO: 6718 - DNA, 453 bp, Triticum aestivum
  unsure (1)..(453): unsure at all n locations
  Clone ID: uC-tsrow189001g02b2
tgtttaggtgcgcggcatcgagctcatcgcctcggagaacttcgtctgccgcgccgtgctcgacgccctcggcagccacctcaccaacaagtactccgaggggcacccgggcgctcggtactacggcgggaaccagcacatcgacgccatcgagcgcctctgccacgagcgcgcctgcaccgccttcggcctcgaccccgcctgctggggtgtcaatgtccagccctactcatgcacctccgcaaacctggctgtctacacagggcttctcctacccaatgaccgtatcatgggccttgagccgccgtctggtggccatgtcagccacggatactacacgcctagtggtaagaaggtgtctggcgcctcgatattctttgaaagcttgtcatacaaggtgaatccacagactggctatattgattatgacaagctngaggaccgggcaatgga

SEQ ID NO: 6719 - DNA, 382 bp, Triticum aestivum
  Clone ID: uC-tsrow189001g03b2
ttcttcacgcaagtacacaatgatggacgtcagcctcctggagaaggccctcctgggcctcttcgcggcggcaatgctcgccattgccgtcgcaaagctgaccggcaagcgcttccggctgcccccggggccctccggcgcccccatcgtgggcaactggctccaggtgggcgatgacctcaaccaccgcaacctcatgggcatggccaagcgtttcggcgaggtgttcctgctccggatgggcgtccgcaacctggtggtcgtctccagccccgagctcgccaaggaggtcctccacacccagggagtcgagtttggctcccgcacccgcaacgtcgtattcgacatcttcaccggcaaaggccaggacatggtgttcacc

SEQ ID NO: 6720 - DNA, 445 bp, Triticum aestivum
  Clone ID: uC-tsrow189001g04b2
ctgttgctggcagcacaactaaagattgtgagtttcctgctctccagttgaagagaccaccaaagcctgctagccgaaaagatgaacggcaagtgagcgtagcggaacagactaatggccgaaccaatgcagctctcagtcaaggacctgtagctgaaaatgaatctgagaaggtgagcaaaaatatgagtagtgaaactgctgatgggaagccctttctacagatcgggagcaacatggtgccagttactgttggaaatgagactaaagaagctgctcaaaccgtacaacagtttgtagtatatgtgggatttgagcatgagtgctcgtacggtcaccgtttcttactgtcagagaagtatctcaaggagattgattatggaagatcttatcaaaacaatgaagcagaaagtaagcacagttcacaaaagttgcccccaaatgc

SEQ ID NO: 6721 - DNA, 434 bp, Triticum aestivum
  Clone ID: uC-tsrow189001g05b2
tttttctcttcaacctgagaagtttggattttacaagcagtttcctagggcatgttgtgggtctcccgggtctgttgccaaagccgtttacaacttcaatgtcacagccaaatgtggggagcctggtgccactgcttgcgctgatccatcgacccattggagctgggacggtattcacttgacggaggttgcttatggtcatatcgccaggggttggttatatggcccttttgcggaccaaccgattgttcagtccctgtagtccacctctactgttgcacttgtagagcgtctgaaaatggtgcactaaactggagcaggaaaagtagttcttccataaagttccaatgttcaatacgtgtatatttttatttgattgaattcattgcaagtggggtacaaaggtaaaataggggatgccagaagaatgactt

SEQ ID NO: 6722 - DNA, 391 bp, Triticum aestivum
  Clone ID: uC-tsrow189001g06b2
tttttcgcgtccgcccacgcgtccggctgcacacctgatctcatctcatctcagtcttcccccacattgccattccctccttgcgagtagcagcagcaatggccagcctcgccgacctcgtcaacctctacctcagcgactgcaccgacaagatcatcgtcgagtacctctgggttggaggatccggtatcgacatcaggagcaaagcaaggacggtgaacggccccatcaccgacgcgagccagctgcccaagtggaactacgacggctccagcaccggccaggctcccggagaggacagcgaagtcatcctctacccccaggccattttcaaggacccgttcaagaggggtgacaacctccttgttatgtgcgactgctacacacccca

SEQ ID NO: 6723 - DNA, 294 bp, Triticum aestivum
  Clone ID: uC-tsrow189001g08b2
gttctctcccgcccgacgccgggcaccgtccagtgcttcggccggaagaagaccgccgtcgccgtggcctactgcaaacccgggcgcggcctcatcaaggtcaacggcgcccccatcgagctcatccgccccgagatgctccgcctgaaggccttcgagccgatccttctcgccggcaggtcccgcttcaaggacatcgacatgcgtatccgcgtccgcggcggagggaagacgagccagatctactccatccgccaggccatcgcgaagtctctcgtcgcctactaccagaag

SEQ ID NO: 6724 - DNA, 278 bp, Triticum aestivum
  Clone ID: uC-tsrow189001g09b2
tgtctttcacgcgtccggcggcccagggcccaagattgaggtggtcgactaattgatagatttagatcgcctactattctgcttgaataatgtgtctctcattgtacggtggattctattatcgttctgcagtttttcgttcgggcatatatacattgccccatcttatgtttaagttgatattgaaacatgattatttagtactagaagacagtatacttggttatctgcagttatttcacatttatttatctttgattgaatgtctggttgctcaa

SEQ ID NO: 6725 - DNA, 409 bp, Triticum aestivum
  Clone ID: uC-tsrow189001g10b2
tcttcacgcgtccggttttgcatatacttatataggtagtgtgcttagcttgtgagcagaagatacaccacgatggctccaccggcgaaactgacccagtatacccagctgatcctactcctccttgcagcagcagtagctagtgatcacttgaccctgcagcaggctgcggctgccgccgatgaattacaaggccgaccgcagcaggggctggggcgtccgggttgccgggacaagtgcggcgacatgagcatcccgttccccttcggcatggacaagcccggctgcttcctacccggcttcgaggtcacctgcaacacctactgcactccgcctcgcgccttccttgcctacaaccacagggagccaccataccaggagatttaccagtatgcattcggcactgaga

SEQ ID NO: 6726 - DNA, 406 bp, Triticum aestivum
  Clone ID: uC-tsrow189001g12b2
ccgttatatggttgcaaaccagttgtatgagctctgcgaggcagttggtcctgagcctacaagagcagacctggtgcctgcatatgttcgcctcctccgtgataatgaggctgaagtgcggatagcagctgccggaaaagttactaagttctgtaggatattaagtccacagcttgcaattcagcacattctgccgtgtgttaaggaattgtcatcagattcgtctcagcatgttcgctcagctttggcttcagtcatcatgggaatggcccctgtcttggggaaggatgctaccattgaacaacttcttcctatttttctttctttgctgaaggatgaatttcctgatgttcgactcaacataatcagcaagcttgatcaagttaatcaggtcattggaattgac

SEQ ID NO: 6727 - DNA, 272 bp, Triticum aestivum
  Clone ID: uC-tsrow189001h01b2
cccttctcttcggcggcggcttgagaccgttcgagcgagctttggtttgtcgcggcggcggaaggaaggaagggagtcgggaagatgagccgcagccttgggatcccggtgaagctgctgcacgaggcggcggggcacgtggtgacggtggagctcaagaccggcgaggtctaccggggctccatgatcgagtgcgaggacaactggaactgccagatcgagaacatcaccttcaccgacaaggacggcaaggtgtcgcagctggagcacgt

SEQ ID NO: 6728 - DNA, 289 bp, Triticum aestivum
  Clone ID: uC-tsrow189001h02b2
cccttctcttcggcggcggcttgagaccgttcgagcgagctttggtttgtcgcggcggcggaaggaaggaagggagtcgggaagatgagccgcagccttgggatcccggtgaagctgctgcacgaggcggcggggcacgtggtgacggtggagctcaagaccggcgaggtctaccggggctccatgatcgagtgcgaggacaactggaactgccagatcgagaacatcaccttcaccgccaaggacggcaaggtgtcgcagctggagcacgtcttcatcaggggcagca

SEQ ID NO: 6729 - DNA, 60 bp, Triticum aestivum
  Clone ID: uC-tsrow189001h04b2
ttttctttgtatccaatgagcttatagcaatttgagtattcccaacttttttcctctcct

SEQ ID NO: 6730 - DNA, 362 bp, Triticum aestivum
  Clone ID: uC-tsrow189001h05b2
acgccaccatgggtatctcgcgtgactccatgcacaagcgccgggccaccggtgggaagcagaaggcttggaggaagaagcgaaagtatgagctcggccgccagccagccaacactaagctttcaagcaacaagacagtgaggagggtccgtgttcgcggaggtaacgtgaagtggagggctctccgtcttgacactggtaacttctcatggggtagtgaggctgtgacccgcaagacccgtctcctggatgtggtttacaattcgtcaaacaatgagcttgtgaggactcagacccttgtcaagaatgccattgtgcaagttgatgctgcccccttcaagcagtggtacctgactcattat

SEQ ID NO: 6731 - DNA, 333 bp, Triticum aestivum
  Clone ID: uC-tsrow189001h06b2
cgcacgtgtccaacccccacagcgggtttttttaagcagtttctccgttggccgccgcggcgggcggcgcgacgacgtcgacgaggcgcgggccgggcggcgggggccggccgatggacgacgagaacctgaccttcgagacctcggcgggggtggaggtggtcggcagcttcgacgccatggggatccgcgaggacctgctccgcggcatctacggctacggcttcgagaagccctccgccatccagcagcgggccgtcatccccatcatcaccggccgcgacgtcatcgcccaggcccagtccggcaccggcaagacctccatgatctccc

SEQ ID NO: 6732 - DNA, 281 bp, Triticum aestivum
  Clone ID: uC-tsrow189001h07b2
atgccccttcccttctcttcggcggcggcttgagaccgttcgagcgagctttggtttgtcgcggcggcggaaggaaggaagggagtcgggaagatgagccgcagccttgggatcccggtgaagctgctgcacgaggcggcggggcacgtggtgacggtggagctcaagaccggcgaggtctaccggggctccatgatcgagtgcgaggacaactggaactgccagatcgagaacatcaccttcaccgacaaggacggcaaggtgtcgcagctggagcacgt

SEQ ID NO: 6733 - DNA, 332 bp, Triticum aestivum
  Clone ID: uC-tsrow189001h09b2
ttttcacgcgtccgcccacgcgtccgagcactgctatctgcttcgaggagcccgtgttcaccagcggcgatgcaaagtattcgacgagcctgcgtaccggcggcaagtcgggccgcaggaccggggacaagtttgctcggggcatcaaagaacatcttaagtcctccttcagtccttctctagtccatctggataaatctttgtagctctggttgtgaattagacactgaacatatgtttctgcagtgactctcggcccaaagctgtacgagaccgtgaggggaaagctgtcgctgggcgccagaatcctccaggccggcggcgtggagaaa

SEQ ID NO: 6734 - DNA, 306 bp, Triticum aestivum
  Clone ID: uC-tsrow189001h10b2
cctctctccatggcctcctccggcgggcacacggtgcccctgctcgcccgacttccagccgaggcggcggaggcgtacaccaccgacgggacccttgacttcgacgggaacccggcgctcaagaatcgcacgggcggatggcgcgcgtgccgcgcagttctcggaaccgagttctgctactgcctagcgttctacggcatctcctacaacctcgtcacgtacctcaccggcgtcctgggccagagcaacgtcgccgcggcgaggaacgtgtccacctggcaggccacctgcttcctcatgcccctc

SEQ ID NO: 6735 - DNA, 60 bp, Triticum aestivum
  Clone ID: uC-tsrow189001h11b2
cacgcgtccgaaaaaaaaaaaaaaaaaaagaattaaaaaaaaaaaaaaaaaaaatataac

SEQ ID NO: 6736 - DNA, 422 bp, Triticum aestivum
  Clone ID: uC-tsrow189001h12b2
cccacgcgtccgattatatcctctgcaccggtgctgatctgaatttcccctttcctcctcctcttcttcttcttgttcttcttcttcttgatcctcgtcgctcgcagctcgcagttgagctgccggagatgtcgttctcctccttgtccaaggccagattcgagggtaaaggaggcggagccgggagatccatatcgctgcccgcctccagggccaagctcgccgcagccaccaagaaagctactactactagtacagccggaggcgggcggggcaagggcaaggcggccaagaaggtcttctccctcaccggccagaagttcgaaacaccagatgagagggagcccctgaggatcttctatgaatcgctctccaaccagatcccatccagcgacatggccgaattctggctaatggagcac

SEQ ID NO: 6737 - DNA, 324 bp, Triticum aestivum
  Clone ID: uC-tsrow189003a02b1
ttgttaggaaaccctgtgcgcaagaaggtgggaaggcatacttgatcatttttattctgtagacatcacagaacaggaagctaagaaggggctagtttgccgtgtgcattcaactgaaaaaagcaaatttaagctgctttattttgagctcgaagaaaatggtgggttgagccttgcacttcaggaagatagtgtaaaggccagcaaagtttcttctgcaggaatgtactttcttgggttccctgtgtattcgcttgagcaaaataactcagttctttgtttgcacatcaccatggcagggttacattcttaaacaacacgatt

SEQ ID NO: 6738 - DNA, 337 bp, Triticum aestivum
  Clone ID: uC-tsrow189003a03b1
ttgtttcaaacaacgcgtgtgacgtgtgcctggccgttcgtgtgcgtctccgagggcgacagggaaggaaggaaggaaggggatgagctccttcgtcggcgccgccttctggtctgcgtcgccggtgccgccggaggacgacgtctgctacgtatgccactaccgctttcggatcccctgccaggccaactgctcccactggttctgcggagagtgcattattcgtgtttggaaccatggagctgctgtacagccttgcaagtgtcccatttgccgacgccttataaatttgctggtacctgctaatgtatcacacgatcacaatgatgatccccaa

SEQ ID NO: 6739 - DNA, 315 bp, Triticum aestivum
  Clone ID: uC-tsrow189003a06b1
gcttgtttttttctcacctcttcttgttttactgaccagtctctgatgttcgcaggccactacccacaagcattcgcatctggctgctcaattcggtgttcttcgtgaaagcaattgctcaccactctgctgcaatccaatttcttgtcctttcctgcgcaccaatttccccatttttgcgcggaaaggttcaggcggccttcgatcgatttgatgttcttgcccaagcgctgaatttcttggggtttctgaggctttagaagcttgttagatcgacggagatgcacctagctctcagctccgatcactcagctg

SEQ ID NO: 6740 - DNA, 289 bp, Triticum aestivum
  Clone ID: uC-tsrow189003a07b1
tgggcggagccgccggtgtccccggaggtgggggtggcttcggcagagggggtcatgcgaggatggccgctggggcgaggaggcggagccgatgaccccggcggtggcagcgacagagggggtcggcgatgatggtcgatggggcgaggaggctgagccgatgaccccggcggcggcggaggggtcccaggggctcgaggaccgacgtctgatgcagtcgtggttcctcgtcgtcaagagctagatcgagcgcccgacggtgtagccgtccagaggaagaggaagaaca

SEQ ID NO: 6741 - DNA, 273 bp, Triticum aestivum
  Clone ID: uC-tsrow189003a10b1
tctgagaacaacttacaccgactatgccggtggtattgatcctaaaaatctatcccggtcaagtagtggctacatcgggaaattgaggtcaaatttcctcggcaccaaattcatcatgtacgacacgcagccgccttacaatgccagtaaactctgcccgcaggaacggaccagtcggcggttctcctccaggaaagtctccccaaaagttccagctgcaactggcagctacccgatcgctcaggtgaactatgagctgaacgtgctcggcac

SEQ ID NO: 6742 - DNA, 313 bp, Triticum aestivum
  Clone ID: uC-tsrow189003a11b1
tggctactacggcccgacgatcatcatgggtgcgatggatgagaggtcgctgacgttccacactaaccggcggcggtacggcccctacggggacgagtacggcacctacttctccaccagcttcgccgacgggcgggtcgtggggttccacggccgggagggctggtacatcgactgcatcggcgtgcatgtccagcggggcaaggtgccgtcgtccctcaggcgggccagcagcaggagcccgtcgccggcgccgcggtccgactacgacccgagcgacgtggacgaggaggttccctacgcggtcatggtg

SEQ ID NO: 6743 - DNA, 108 bp, Triticum aestivum
  Clone ID: uC-tsrow189003b01b1
ttgctatccctccgctcgcgtgtgatacacttcctgggccggcccggctagatctcgccggcaggagatggcggacgcgaagcagcatcaggccgcggcgcccaccgg

SEQ ID NO: 6744 - DNA, 302 bp, Triticum aestivum
  Clone ID: uC-tsrow189003b02b1
tcgtcggtcggttcctgccctgcctgcgacgccacctctcgccgaccccggcgtcgctccgccgctcgcccacatctgccagccgactcgcgcgcgccggccgaaaagggtatcccatcatggatgcagcaaaggacacaaacccgtcatgtaaactccacacaagactgagactctgggagtttgcagaccggtatatattcgaaccaattgatggtcttgctgacttatatttgacagctagcccggccagtggatcaatgaattcagctgaagagttggcaccacgtagcccctccata

SEQ ID NO: 6745 - DNA, 328 bp, Triticum aestivum
  Clone ID: uC-tsrow189003b03b1
tctttaggatcctgtcaaatgtttgtacaggctttgaagtaaccaacaagtagctcgatcagaaatcattcgcgcctaagaggacgtttatgactggatggtttttgaagactgccaactggaagagctcaccttgcatacacatgaatgcacggagcaaacgtcgcggctcttcattatgcttcattatgctgtggatgcttgtgttacccaacctctggataatatgcagcggcagtattcataaacacgttctcctgccagggttcagtggctcagaaatggattacatcgataacaatggaatatttctgctctctaatggatc

SEQ ID NO: 6746 - DNA, 224 bp, Triticum aestivum
  Clone ID: uC-tsrow189003b04b1
gtgggcggacgcgtgggctgatagagggtatgttctgtactgggaaaagatggtcaaggaaatgaagtggcttgaaaatcatgtgcttaaagattttctggagtgggagccaatgcgccgtaaaggtttgtaccaatcaattaagattgccaatgggttcagcaacattcatttgggtctagcatgtcatggtttcgaggagtatgtattgaggactcgccttt

SEQ ID NO: 6747 - DNA, 355 bp, Triticum aestivum
  Clone ID: uC-tsrow189003b05b1
ttgttcgacgagcagcagcagtgcgtcaaggtccagttcgaggtggacgagccctcgtcctccgtcgactgcatgatcggggccctcacgcgcctcaagagcatgaatgtcaagaccagggggatccactccatcttgtccggccagcggttgacgacggagatgaatgtcgaaaccacgattgcggcctgcgaggtagaaaaggcagtggaggaggctctccaggaagtagagaggaatcagctgcctgacagcgaggccccgtttcccggaagcaggaccgcctggcctcaaacatcacacgtgcaaaatgtgtgctgagaggtttctaaccacaagagtcatgagacccatc

SEQ ID NO: 6748 - DNA, 323 bp, Triticum aestivum
  Clone ID: uC-tsrow189003b06b1
ttctttctcaaccaagccaaggccaagagctcagtgaagcacccgcggccatggagggcaaggaggaggacgtgcggctgggcgcgaaccgctactcggagcaccagcccatcggcacggcggcgcagggcggcggcgcggacgagaaggactacaaggagccgcccccggcccccttcttcgaggccggggagctcacctcctggtccttctaccgggccggcatcgacgagttcctggccaccttcctcttcctctacatctgggtgctcaccacgatgggcgtggtgggcaacccgtcggggtccaagtgcggcacggtc

SEQ ID NO: 6749 - DNA, 332 bp, Triticum aestivum
  Clone ID: uC-tsrow189003b08b1
tcttcttcccgaggcaccatgaggtcgtcgtcgatggcgaccgcgatactatccatcgccgccgttgtcctcctcctcgccgtccaggacagccatggcgcgaaactgtgcatggactcgacgttcccgagggcggtcaacggatccctttccttctgcggctacaacggcactgcttgctgcaacacgacggacgacgccgctgtccggaggcagtttgccgcaatgaacatctcaggcacgccgtgcggcgacctcgtcaagtccatcctttgcgcgagatgcaacccgtacgccggcgagctcttcaccgtcgggacaagccctcggac

SEQ ID NO: 6750 - DNA, 221 bp, Triticum aestivum
  Clone ID: uC-tsrow189003b09b1
tcccacgcgttcgcggacgcgtggccggtgaaccctgttgccacgcccaaggcgcagggggtgttccacgtcgacatgatcatgctcgcgcacaaccccggcggcagggagaggcacgagagggagttcgaggccctggccaagggcgccggcttcgccggcatcaagaccacctacatctacgccaacgcattcgccatctagttcaccaagtagatcca

SEQ ID NO: 6751 - DNA, 290 bp, Triticum aestivum
  Clone ID: uC-tsrow189003b10b1
ggccattgccagagagacccagcaaccgggaaccatgagaggccatagccaagttcttgcaagagaggaaagaaatcgaagaggcagagaaacagagggaggcagagatgggaagaagaagaagcccggctctgccgctgctggtgatcttcggcatcctcgccggcgtcctcgcagctcttcctcccctcgccgaatccaggagcaggcaccaccaccaccaccaccaaggtcacgggcaccactcccgtgtgcaaagcagatggcacggaggagagggagagcagtcg

SEQ ID NO: 6752 - DNA, 327 bp, Triticum aestivum
  Clone ID: uC-tsrow189003b11b1
agtgcccacgcgtacgcccacgcgttcgcggacgcgtgggatatcctcaaggcactgtaggagcttcagcgcttcggaatcgcagcgatcacccagaccttgtgtcatatcgatgtagtttgaacttgtctgccaaactgcgtgggaataaattgtcgatgtgcatttcttcatgtactttatgtgtggtgcaagtgacttcagagttttccagtcaaattggtggttgcgttgcaaacattctgagattgttgaaggaaaatggtgtgggtggtatttgtgtgaatcatcattaccttgtgaaatcaacaggcaagtgtttttttt

SEQ ID NO: 6753 - DNA, 112 bp, Triticum aestivum
  Clone ID: uC-tsrow189003c01b1
tttttattgccatgaaccacactgatgtcatggtgaccagcacattccaggaaattgccgcaagcaaggatagcgtgggccaatacgagcctcacatggctttcaccctccc

SEQ ID NO: 6754 - DNA, 289 bp, Triticum aestivum
  Clone ID: uC-tsrow189003c02b1
tgtttaagaagaagaagaagaagaagaaggagaagaagaagaagcaagaagaagaagaagaagaagaagaagaagaaggagaagaagaagaagcaagaagatggcggacgaggggaccgccaactgcatcgacatcatgctcgccatgatcctgccgccgctcggcgtcttcttcaagttcgcctgcgggatcgagttctggatctgcttgctgctcaccttcttcggctacctccccggcatcatctacgccgtctgggtcatcaccaagtaggactgcatgcaggag

SEQ ID NO: 6755 - DNA, 85 bp, Triticum aestivum
  Clone ID: uC-tsrow189003c03b1
ttcatatcgtgcggtgcagacgcctgctcctggggggccgccgtcgacgcactctccagagaccgcaggcatgggcgtcttgacc

SEQ ID NO: 6756 - DNA, 225 bp, Triticum aestivum
  Clone ID: uC-tsrow189003c04b1
tcgttcgcgtggggggaactctcgggttccttgggggatccttgatcaagctcatccccatcaaggagtacatgaggctcacctacacccctgtgaagggccctctgaaggaggtggcgcatgcgtacgccgactccgtcgcgccgagggacggcgaccctgcaaaggtccccgacttcctggaggggatggtgtacagcgcgacggagggcagcatgatgaccg

SEQ ID NO: 6757 - DNA, 241 bp, Triticum aestivum
  Clone ID: uC-tsrow189003c05b1
ttcttagcgacgcataccactacttcacttactggatcggcctaagcaagcaagtgaccatgggcggcgggcacgacatgcacggaggccacaacggcggcgtgaagggcttcttgtacaaccttgtcggcggctgcaaaagccacgggtacggcggccaggggcacggatgcgaccagggctacggtggccacggtcagcagcagcacgggtacgtgagccacgggcagcacgggtaccc

SEQ ID NO: 6758 - DNA, 225 bp, Triticum aestivum
  Clone ID: uC-tsrow189003c07b1
gaggctccttgcgcaactttgggctatctgggcaattatctcgcggagttgactttgaccgattacagctgcctgaaataccacccttcggtggtggcagcctcagcagagttccttgcaagatggacactcgaccaatgatacctggcatggaactgtactctcgagcattacacctgatacaaaagctgcgatattcaaggatgcgtacgcgatctatgggag

SEQ ID NO: 6759 - DNA, 246 bp, Triticum aestivum
  Clone ID: uC-tsrow189003c08b1
gctccacgcgtccgcccacgcgtccggcttggtggtctatccactcctgcggctcccgtgccgctgcgccctcgcggcggcgccgcgggccgccgcggcgtcggtggtgtcgctgtgggcctcggcctcggtggcggacggtggggacggggagctgactgcgcgggagaggcgggagaggctgagggaggcgcgggagctgaaggcgcgggactggaaggaggaggtggaggagcggctcatcca

SEQ ID NO: 6760 - DNA, 284 bp, Triticum aestivum
  Clone ID: uC-tsrow189003c09b1
tgtcacgcgtgcggcctctctctgtttgctctggcgtccgccgagcccatcctcgtgcgcgcctgcgcccggcccgtgctcgctcgctcgccgactccctcgcctcgatccaccgcgccggcggcatggcggatcagctcaccgacgaccagatcgccgagtgtcaaggaggccttcagcctcttcgacaaggacggagatggttgcatcaccaccaaggagctgggaacagttatgcgttcgctggggcagaacccaacggaggctgagctccaggacatgat

SEQ ID NO: 6761 - DNA, 234 bp, Triticum aestivum
  Clone ID: uC-tsrow189003c10b1
ttcttttagattgttcctgccactgctatccctgagggttggatgggtctggatgttggcccagattccatcaagactttcgcagaagccctggacaccaccaagactgttatctggaacggtcctatgggagtctttgagtttgagaagtttgccgcaggcactgatgcaatcgcgaagcagttggctgagcttactgggaagggtgtcacgaccatcattggtggaggtgac

SEQ ID NO: 6762 - DNA, 290 bp, Triticum aestivum
  Clone ID: uC-tsrow189003c12b1
tttttacgctccagcacctctcaacctcaagtgggggccactaccaacaacaccacgagaacacacatgaccttcagcgtctcgccggcgatggagggggggcaagggcacgagtacatgatccgcttcgacagccacttcgacgacccgtcgccgagcaccgccaccgccgagccgtcgccgtttgccggaaggtcgatctcgccggagcaggagcacggcgccatggtcgccgcgctgctgcacgtcatctccgggtacaccacgcctgcaccggacttcttcttccc

SEQ ID NO: 6763 - DNA, 235 bp, Triticum aestivum
  Clone ID: uC-tsrow189003d01b1
ttgcttcgcgtccgccgtcacaagacggactggggggaacaacaagagcggcatcatccatggcgtccactcgcgtgctccacctcatcgccctcgtcctcgccgtcgccaccgccgcagatgcggccaccatcaccgtcgtcaaccggtgctcctacacggtgtggccgggcgcgctgccaggcggaggcgtgcgtctcgacccgggccagtcttgggcgctgaacatgcccgc

SEQ ID NO: 6764 - DNA, 226 bp, Triticum aestivum
  Clone ID: uC-tsrow189003d02b1
ttgctaggaccaaaggattcttgccagtggtgtgcatgttgttgtcggcacacctggtcgtgtgttcgatatgttgcgcaggcaatccctccgtccagataacatcaagatgtttgtgttggatgaagctgatgaaatgctttcacgtggtttcaaggatcagatctatgatatcttccagcttcttccatcaaagattcaggttggggtgttctcagcaaccatg

SEQ ID NO: 6765 - DNA, 235 bp, Triticum aestivum
  Clone ID: uC-tsrow189003d03b1
tctttcgcgtccgcggacgcgtgggcgaatgcacgtgctgttctatcgcgtcgtacgtcagctgaggaagcttctgtgggccagctttgcgggtgcatacttgcgtatatggactgtgcggcggcggcggcggcgatctaccggctgccggaggagtgcgtggcgcacgcgatcgcgatgactacgccgggggacgcgctcagctcctccgccgtgtccccggcgttccgggccg

SEQ ID NO: 6766 - DNA, 254 bp, Triticum aestivum
  Clone ID: uC-tsrow189003d04b1
ttgcttattcatgttcgagacattcaatgccccagggatttatgtggctattcaagctgttctttctctatatgccagtggtcgtactacaggtattgtgcttgattctggcgatggtgtgagccatactgtgccgatttatgagggatatgcacttcctcatgctattctgcggctggatcttgcgggccgtgatctgaccgattgcctgatgaagatcctcacagagaggggctattgcttcaccacaactg

SEQ ID NO: 6767 - DNA, 314 bp, Triticum aestivum
  Clone ID: uC-tsrow189003d05b1
tttgtaggagatactcaagttacatggaaatgtgggaatgcttatgagcaaggagaaggcttctgtcgacatcagatcctgcaatgaagagatcacaaaattggtatcccacatgcacatggccatcatgaatgcagctctgttcaaggagaagatcattgagctcatcgtaacatgtgagagctatgagataagtgccatggtgcagaaggaggtgctcaaggaagatatcacccgaaggaattcgtatgtggacgagctgaaagacaaactaaatgctgtagagattgagaacagaagactgaaggtcgatc

SEQ ID NO: 6768 - DNA, 204 bp, Triticum aestivum
  Clone ID: uC-tsrow189003d06b1
tttttcgcgtccgcccacgcgtccgccaagatgcgcataccttgttacttgttgttggctaccaaagtcaacccaaggatgaagcagatcgctgccgatatcgagagggtcctcaagggcatcgtggccaagagagagaatgccatgagagccggcgaggccacgagcgacgaccttctcggtgtgctgctcgagtccaacatg

SEQ ID NO: 6769 - DNA, 260 bp, Triticum aestivum
  Clone ID: uC-tsrow189003d07b1
tctatggacctaggatgaacatcgatgatggccgtgttgttagtaacttcattgctcaggccattcgtggtgaagcactgactgtccagaagcctggaacacagaccaggagcttctgctacgtcgctgatatggtcaatggtcttatgaagctgatgaatggagacaacaccggacccattaacattgggaacccaggtgaattcaccatgctggaacttgccgagaatgtgaaggagttgatcaacccagaagtgaca

SEQ ID NO: 6770 - DNA, 326 bp, Triticum aestivum
  Clone ID: uC-tsrow189003d08b1
ttagcggctgatcgtggaggcaagccagggcggcgccgacgaggtgcgcgtcgacggcctgcccggcggcgcgagggccttcgagatctgcgccaagttctgctacggcatggtcgtcacgctcaacccgtacaacgtggtcgccgcgcggagcgcggcggagcacctgggcatgacggaggacgtggacaagagcaacctcgtgttcaagatcgaggtgttcctcaactcgggcgtcttccggagctggaaggactgcatcatcgcgctgcagagcaccatcgcgctgctgccgtggtccgaggacctcaggctcgtcgcgcgct

SEQ ID NO: 6771 - DNA, 353 bp, Triticum aestivum
  Clone ID: uC-tsrow189003d09b1
ttgttttattagttgattggcatatatggatctctccatgtttattagttgatctccaacccctactctgctgtggtgttgtgggagcaagaagagcatgcatgctttctctctacatctagggtccatacggccagattgacgggcctaaactctggcttcactcggatttatgtgaatataagcgtaagaggtctagtggcaatgctacaaaatcattgcaggcgtgagtatccggattgcactactgctggccgtttcttgcgattgcgtacaacaggcttgtgacaaagccaagtcatggcctcattaggccccttttttcagccaaactgaaagcacttcatgttagc

SEQ ID NO: 6772 - DNA, 273 bp, Triticum aestivum
  Clone ID: uC-tsrow189003d10b1
ttcttgtcacgcgtccgcccgcgaccacgcctgcgcgcctccgttccgtgcctgcagtgccgccatccacgacctcggccgccggcgagagccccatgttgttgcctctgcccaagctcgctgcagcctgcagcgcctcctgctgtcgaccgtggacgagctatggcgaggggcgccacactggtgcggtcgccgccgcgagcatgggcacggttaggccgctccaccacggcgcgcgcggggaggggccggcgggcgcagatggcctgagat

SEQ ID NO: 6773 - DNA, 202 bp, Triticum aestivum
  Clone ID: uC-tsrow189003d11b1
ttgcgatctgcactactcacggtaagaaccacaaccactacaagtgagtgaccatctgagcaaggaaagaccaggagagatggcaatgaggccgcttgtcgtcctggccctggccgaggcgctcgccggcgtggcactgggagggggcgcggcggagggggccggcgagtgctggaggtcctcccccgaccggatggccctg

SEQ ID NO: 6774 - DNA, 364 bp, Triticum aestivum
  Clone ID: uC-tsrow189003d12b1
ttgctctcacgcgtgcgcccacgcgtccgttccatggccaagactggtgagaactacaggcttctgtatgacaccaagggtcgcttccgccttcactctgtcagggacgaggatgctaagttcaagctctgcaaggtcaggtctgtccagtttggccagaagggcatcccatacctcaacacctatgatggccgcaccatccgctacccagacccactcatcaaggccaatgacaccatcaagcttgacctggagaccaacaagattgttgacttcatcaagtttgacgtcggcaacgtggtcatggtgactggtgggcgcaacactgggcgtgttggtgtgatcaagaacagggagaagcata

SEQ ID NO: 6775 - DNA, 245 bp, Triticum aestivum
  Clone ID: uC-tsrow189003e02b1
ttccttttcctagccctctacctgactactgactagaaataccacacgccccgtccgtcgccacccggcgcgcgcagcagactaccgactaaccaaccattctcaccattaaccaccaattcctcccgtgacagggaggacgccgagaggcagcgaagaaggaaggaaggaggcaaggttgagacaacagccagcaatggagaaggcgctcgacaggcagaggatcctgctgcggcacctggagc

SEQ ID NO: 6776 - DNA, 90 bp, Triticum aestivum
  Clone ID: uC-tsrow189003e03b1
tcctttcgtccgggtatctcttttgaagatatgcctgatgagagctggaagggttggcttttggcgtctctatgtcacctggagaatctg

SEQ ID NO: 6777 - DNA, 307 bp, Triticum aestivum
  Clone ID: uC-tsrow189003e05b1
tccttctccaacccgccgcagtactacccgcagtacgggaactactacccgccgccgccgtcctccgtgcaggtgcccctcccggcgccctacgaccatcaccacaggggcgccgcgccgtcgcccaacgtgccacccacggagttcccgccctccgtccactcgcaccactaccccggctgggccggacggtacccttacgggctccagccgtccatgcccacgccctacgtcgagcaccagaaggccgtgaccatccgcaacgacgtcaacctcaagaaggagacgctccggattgagctcgatg

SEQ ID NO: 6778 - DNA, 183 bp, Triticum aestivum
  Clone ID: uC-tsrow189003e06b1
tcttttcgcgtgcgctctccgcgaccttcacggggggccggacgttcctcaagtgcaaccagctgcccgtgctcggcgccagcctccactggacgtaccacgcctggaacggcacggccgacatcgccttccgggcgccgtacggcgccgacgggtgggtcggctggggcatcaaccccagcg

SEQ ID NO: 6779 - DNA, 334 bp, Triticum aestivum
  Clone ID: uC-tsrow189003e07b1
tttcacgcgtccggcggactaccacttcgtgtacaaggacgtggagggggcgaccacgcagtgggacgacatccagcgcaaactcgggaacctgcccgagaagccggagcccttcaagccgccgcccttcgcccccagggtcgacgccgacgagcagcccaagtccaaggagtggctcgacgcgcgcgaccccgacgagctcgaggagctcgaggacgacctcgacgatgaccgcttcctggagcagtacaggaggatgaggcttgcagagctcaaggaggcagcaaagactgccagattcggcacagtacagcccatcacaggctctgatttt

SEQ ID NO: 6780 - DNA, 362 bp, Triticum aestivum
  Clone ID: uC-tsrow189003e08b1
tagaagagatcgtcatcatccgccaaaccagatcggctcggctgcttcctcttcttcaacttcgcagaatcgctggtcttctcgtcctctagttaagtccctcgacagcaatgggaggaggcaacgacggtcatgggtacccacccggtggccaggggggataccctccgcaagggtacccgccgcagcagggaggttaccctccacagcaaggatacccgcctgcacctggagcttacccacctgcacctggggcataccctcctgcacctggggcataccctcctgcacccggagcgggtggcagtgactgggagaaggtgctcctctccaacatcatgcacggtgttgccggtgctcat

SEQ ID NO: 6781 - DNA, 186 bp, Triticum aestivum
  Clone ID: uC-tsrow189003e09b1
tgcgccgctttcgccaccgactcatcgagacatcatacatggcggcggtcgcagctcgcgccggtgcagcacgggtcgggttccggcggatgttctccgtctacgccttcgctcccccgcctccccccaccgttcgccccgcggcggagccctgcaacaacctcttcgtctcaggtttgaataagc

SEQ ID NO: 6782 - DNA, 359 bp, Triticum aestivum
  Clone ID: uC-tsrow189003e10b1
tctcacgcgtccgattctatgtgggtgataaccaaaatatgacttagtggacaagctcttgagttcaagcaactcaatgtccatgcatgggaggcttttgacaaggggcaggatttccatatgcaagcagctccatctcaagctgaactactgtacaagagtttcaagatcaagaaggagaagttgaaatctgaaagcaaggacaaaattatggagaagtatgggaatgctgcatctgacgaaccaatccctcgtgagcttcttcttgggcaaagtgaaaaagagattgagtatgaccggactggtcgcataatcaaaggacaggatgtagctcttgctaagagcaaatatgaagagga

SEQ ID NO: 6783 - DNA, 172 bp, Triticum aestivum
  Clone ID: uC-tsrow189003e11b1
actgagcatgtatgagtgcaccctgcacatgagcggatactactagcacatcgcacacactcaccactcatgggacatactactagcagtatgtgctgatgtgcagggtgcatgcatgtatgagtgcacatgcgtgttgtcacacacgaactcaaaaatgtttcagattgtg

SEQ ID NO: 6784 - DNA, 268 bp, Triticum aestivum
  Clone ID: uC-tsrow189003e12b1
tgattggcacctgtccgacgcctgcttcttgggatcagttggccggaagatcagcagctttagttgcctactgattcctcttttgcttgggtgtggaaggatggcagagcactctgagaatgcggcagagaacatgatgagcggcatcatggacgccattgccgacaagctccccaagcaaaagtctgtcaggttcgacgatgagggctccatttccggccaagccaagaagctcttcggcggccacaagtctgttcaccacatcctc

SEQ ID NO: 6785 - DNA, 190 bp, Triticum aestivum
  Clone ID: uC-tsrow189003f01b1
ttatttatggctggcacaagaattctggcgagaggcggatattctgacaaagcttcatcatccaaacgtcgtagccttctatggcgtggtgaaggacgggccgggcggtaccctggcgactctgaccgagttcatggtgaatggttctcttcggcatgtcttgcagcggaaggacaagtgtcctgatctc

SEQ ID NO: 6786 - DNA, 247 bp, Triticum aestivum
  Clone ID: uC-tsrow189003f02b1
ttttcgcgtgggcgcggccacaacctacggagcttgcctgatggcgtgcgcaactgctacacgctccggtccctggtgtccggcctcaagtacctgatccgcgccagcttcctgtatggaaactacgacggcctcaacaggccgcccgcgtcgtttgacctccacatcggcgtcaacttctggaagacggtgaacatttcaacgtggggggcagaccagggaaacactgcagtggtggaagccatcg

SEQ ID NO: 6787 - DNA, 174 bp, Triticum aestivum
  Clone ID: uC-tsrow189003f03b1
tcttttcgcatgggcggacgcgtgggcggacgcgtggcacaagcacaagagcaaaggcagcagcactgcagcattgcgctagtgtcatagctcgatcggcgcaggctatctagctagtagcgtcgacccccgccctcccggagcgcagcgtctggcagggtgcgcgagatggcg

SEQ ID NO: 6788 - DNA, 365 bp, Triticum aestivum
  Clone ID: uC-tsrow189003f05b1
tcattttccctgcctccagcaaactcacacatctgaccaccggagctcccaatcccacccgaagcggcagccatggcccccaaggcagacaagaagcccgtcgccgagaacaaggtggagaaggcggcggagaaaacccccgccggcaagaagcccaaggccgagaagcggctgccggcgggcaagactgcgtccaaggaggccggcggcgaggccaagacgaggggccggaagaagggcagcaaggccaagaagagcgtcgagacgtacaagatctacatcttcaaggtgctgaagcaggtccaccccgacatcggcatctcctgcaaggccatgtccatcatgaactccttcatcaacgacat

SEQ ID NO: 6789 - DNA, 297 bp, Triticum aestivum
  Clone ID: uC-tsrow189003f06b1
tctttgtatcccaacccccgagacaactctccggcccgaacacgctcccatctcttttctcgccgccgatccagccggggaaaattactaccccacagtcacgaccgcgcacggcgacggcggccacacagcataccccgccgccacgatgccgtccgcctccagcgccgtgccacccgccgcggcgccgggagacgagtcccaatcccagaaggtcctcctcggcaggtacgagctgggcgggctcctcggccgcggggcgttcgccaaggtgtaccgggccagggacctcctcac

SEQ ID NO: 6790 - DNA, 290 bp, Triticum aestivum
  Clone ID: uC-tsrow189003f07b1
tctcaaggcctgggctggcaaggtggaggacgaggttattgccaggaaggcgttcctggtgaggtgcaaggccaactctgaggccaccctgggtacctacaagggcgatgccaccctctgcgagggggcctctgagagcctccacgtcaaggactacaagtactgatctgccttcggtgcggtggcctgtttgggtgtcctgcttaccagtattatcgtttggttttcagagtcttgatatatacttcggatatccaacctagtatggaacttgtgctctcaaaatagct

SEQ ID NO: 6791 - DNA, 216 bp, Triticum aestivum
  Clone ID: uC-tsrow189003f08b1
tatcgactgcacactccacccccgcgatgccgctcctcctccccctcctcatgctgctcgccgccggcgcggcgggggcagagtcggcgaccccctcgctgcacattggcgtcaactacggcgccaacgccgacaacctcccctccccgacctccgtcgccaccttcctggtcaccaagaccaccatcgaccgcgtcaagctcttcgacgccaacc

SEQ ID NO: 6792 - DNA, 223 bp, Triticum aestivum
  Clone ID: uC-tsrow189003f09b1
tgtgctataaaccgccgccgccgccgcgatgaagttgcagactgaggccgtcgccgccgccgggggggaggggaggctgatgatccggcaggtgtgggcgaacaacgtggagtcggagttccaggcgatccggcaggtggcggagcggttcccgtacgtgtccatggacacggagttcccgggcgtgatccactgcccaagcaagcaccacgcgacgctgacc

SEQ ID NO: 6793 - DNA, 315 bp, Triticum aestivum
  Clone ID: uC-tsrow189003f10b1
ttgtatcgatctacagcacttttcgcctcatacaattcttttcttcttcgatttttccatcaccagaaacgaatagcagagaatttcctgactacagcacaaagaaacagaaaaatttctgacttttttccccagtggattagctttctccggttgttaattccgagacgagatgccggcgtcggggtgcatcatcggtcctcctcggcccggtcctaccagcagccgccgtcggctcgggagtcgtcggctcggtggagcgtggaggccgcgcggcagccgccgtcgttccggtggcacagggaggtaagcaac

SEQ ID NO: 6794 - DNA, 198 bp, Triticum aestivum
  Clone ID: uC-tsrow189003f12b1
ttgctgcgaaccagcaaaaccaagagagcgaaatcgggtgttgattagacgaccatacctaagccaacgaattggacatcgagaggaggacgtccccaccggaccaagagaggagaacggccatcctcgacgccgccgccgccgccgggaaggagtttgatttgttgaggggagttttggatgggggaccatgtggtg

SEQ ID NO: 6795 - DNA, 248 bp, Triticum aestivum
  Clone ID: uC-tsrow189003g04b1
agcgaaagagagagcgagaggagcctcgggcgccatgggattcatcatggagttcgcggagaacctggtcctgcggctgatggaggacccggagcagcgcgacgaggcgcagcgggcgcacgtctaccggatgaaggagcggtgcgagcgcaccaaggccgtctgggcgctcccgctccgcccctacggcttctggaccttcgaccgcttcaactcccagctctcctgggacccccagatcagccagg

SEQ ID NO: 6796 - DNA, 226 bp, Triticum aestivum
  Clone ID: uC-tsrow189003g05b1
atagatgatgccttggttcagaattttagaaactgatcatactgttgtttgattttattttacttttcctcttctaaagcgttgatgcatgcaacgttcttccggagctaaagcctagagcttctgctgctgtaagcgacagggtataaattcttatgacaaatgttcaagttgttgaaatgaatccaaagaagccagtctattgttgtatcaacaagtacattgc

SEQ ID NO: 6797 - DNA, 315 bp, Triticum aestivum
  Clone ID: uC-tsrow189003g06b1
tcctatcttccggggaggacaagagcgtccggttggattatataaagttggttttggtgctctcacaattatgtgctgaacagaatttataggtatggcatctggaggatgaattaatcagcccttgcctgttggaagaactaccgaatcaaggtgatcaaatagacgatctgaaaatactgttcgactgtatctgcgaagctctaacagagatccaggagagatattttagactctcttcttggttgacgtttctcaaacacgacatacgggcacctacaatgggagaagacctcgtcgcagaagttgacaaat

SEQ ID NO: 6798 - DNA, 310 bp, Triticum aestivum
  Clone ID: uC-tsrow189003g07b1
ttgctgccacgcgtgcgcgagatctccgcccgggacccgtttctccgccgccaaggcccagcgccgccgccgcccggccctccctgtcgcaggcgacgccggcgccgccatgtgcaagtctggagccctggatctcgcgtctggccttggcgggaagatcgacaaggaacaagtcaaatcggcggtcgacgagtatgagaaatatcatggatactacggagggaaggaggaatcgaggaaatccaactacaccgatatggataataaatattatgatcttgctactagcttctatgagtatggctggggt

SEQ ID NO: 6799 - DNA, 223 bp, Triticum aestivum
  Clone ID: uC-tsrow189003g09b1
ttcttttcacgcgtccgagcagccgccgccagcaggggcgcataggctcgacaaaccctaaccctagtccatagctagcttagcttccttcctctcgatctagctagagccatggcgccgaccaagggcgaggggccggccatcggcatcgacctcggcaccacctactcgtgcgtcggcgtgtggcagcacgaccgcgttgagatcatcgccaacgaccagg

SEQ ID NO: 6800 - DNA, 399 bp, Triticum aestivum
  Clone ID: uC-tsrow189003g11b1
tttgacgcgtggaaaaaaagttcgcacatcaactatttgaaagggcaaagcatccctttcatttagtctgttattcttatcatctgctttcctaaccacgaaactgagactatgtattttatttgtcctttttacacacccttattgtgttattcactcccttttagttgttgatttatttgaaaatgtattgcttgccagcttttgcattgtcattatcttgaaatcaacttaaatgtgtgtgtgaactgctaacttggttcttcctcccggatgtgattccttagacctttcatcatcatattcatttcattgtatattgcaagactcgcattcaaatgttgaatttgttattcgattgttcttgttctggcattttgattgaaaaactggaatcct

SEQ ID NO: 6801 - DNA, 270 bp, Triticum aestivum
  Clone ID: uC-tsrow189003h01b1
tcgcttcgcccgctccggccggccggcgacgtgtgcagcttggtgaaggagaaggaccaggcggtcgtcgacaagtacacgccgcttctgctcgccatgctgccgagggccccgacttcgccgttcgccccgagcggtggcacgaacgaggccaggaactgatgaagcaaccgcagggttttccagtaggatagatggatcgatctctacaagagaaatcgttcagcatacatatgctcactggctgatagtttgttctgctttgcagta

SEQ ID NO: 6802 - DNA, 390 bp, Triticum aestivum
  Clone ID: uC-tsrow189003h04b1
tgtttaccggtgtatgacacggaattcgccggggagaacagcttggaggattccgagaaggaaatcataaccataaacgatcattcatgcgaagccatttctgatgccaagagcagtccggaggtaaccactgacagagaattggttgtttcgtctcatcaagcagttgatgatactgagaggagcccacagccatcagagagggaacttgtcggtacgagtggtcatccacctgagcttgtttctcttgacagagaagaagcagccagtacgaatggtcagtcagacgctgatgacaagagaagcccagagcatccggagcagaaatttgttttggtagaaggtcactcgcatgaacttatatctgatgtttggaaagaaattgctggt

SEQ ID NO: 6803 - DNA, 237 bp, Triticum aestivum
  Clone ID: uC-tsrow189003h05b1
tggtctcaggagttctacatccggcggctgggcgggcggtctatcagctcggagggcgagaggcagcgggtgatccagcgcctgcaagcggcgatcgagcggcgcgcgtccgagggcgtgaggctggagctgcgcatctccgaccgccgcgggctgctggcctacgtgacgcgcgtgttccgggagaacagcctctcggtcacgcacgccgagatcaccacccggggcgacatggcc

SEQ ID NO: 6804 - DNA, 304 bp, Triticum aestivum
  Clone ID: uC-tsrow189003h06b1
gcgtgcgcccacgcgtccggacaagcggtgctgtaaggcgatatccgagctcatcccacaggagattgcacacatcgagaagaggacgggcaagaaggacaaggacaagaagcccgggatcatcgtggtccagggccccaagcctgggaaggccacagacatggcacggatgcgccagatcctgtcgaagctgaagcacacaccaccgccacacatgaagccacctgcaccacccgacgtggcacccgtcgggaaggacggagctccggccgccgctggaaaggacggagctaaggcggcagcg

SEQ ID NO: 6805 - DNA, 281 bp, Triticum aestivum
  unsure (1)..(281): unsure at all n locations
  Clone ID: uC-tsrow189003h07b1
ttcttcacgcgtccgaaaattactgcacataatacgtctctttcaatgtatggcttctcttggattgtacttcttgttatggtcctcctgttcaagcttttcaccgcaactccaaggaagtcaactgccttgccgatatttattcggtttctacagggcctccttgcaattggcatcattgcagcaattgcatgccttattggatttacagactttacaattgctgatttatttgcaagtgcactagctntcttagcaactggatggtgtatcttatgtct

SEQ ID NO: 6806 - DNA, 212 bp, Triticum aestivum
  Clone ID: uC-tsrow189003h09b1
ttgttgaccactccaccagaggagcagagcaccggtgctctatttattactgccaggagcccaggagaactgtagtagtggtcaccggcgatatggcggcggcaggcgatgggacgactaggaagacggcgtgcgtcaccggagggagcgggtacatcgcgtcggcgctggtcaagatgctgctggagaagggctacgccgtgaagaccacc

SEQ ID NO: 6807 - DNA, 339 bp, Triticum aestivum
  Clone ID: uC-tsrow189003h10b1
ttggaacatacatcttcagactttgttgagaaacaggagatagctcgcttcctccctgccctgccctgccctgctctagcaccggcctgagctcgcgcgtggtgttactgctgagtttggccggaatggggcggtcgccgtgctgcgagaaggagcacaccaacaagggggcctggaccaaggaggaggaccagcggctggtcgcctacatcagggccaacggcgagggctgctggcgctcgctgcccaaggcggccggcctgctccgctgcggcaagaagctgcgcctgcgctggatgaactacctgcgtgccgacctcaagcgcggcaacttcaccg

SEQ ID NO: 6808 - DNA, 416 bp, Triticum aestivum
  Clone ID: uC-tsrow189003h11b1
ttggaaatatccaacatatgatcacaaagaattgctattatcccattcctccgggaattgggcgcacaactcagagcgctcaaattggatatggtaaagccactgtagcggcttatggctacaattggaatgcaaataatccaatagactggatttccgatatgtttgtcggggtccgagggtctacggttttgcatgccaatgttgtgggacaaagcggtaatacagtccaggtgaattccttttctgctgcacgtgcttatgtcccattgcccaatcttccgggaaactccaatacgatttctacttcggtttccgtcactgctggtctcattaatgatatcagtcgcgacgcattatcgaatgcaccatctaccggaagtgggctcagtctcactaactgtgcaacacagtca

SEQ ID NO: 6809 - DNA, 369 bp, Triticum aestivum
  Clone ID: uC-tsrow189003h12b1
ttttgacgcgtggcggcggcggcgcgttgcacaggagaaggagcaggcggcggcggtgcccgaagaggagaagcacggcgacctagcccgagctcgcaaccatggctaggggtttgaagaagcatctgaagaggctcaatgccccgtctcattggatgcttgacaagcttggtggagcttttgcccccaagccatcatccggtcctcacaaggccagggagtgcctgcctctgatcctcatcctgaggaacagactgaaatatgctctcacctaccgtgaagtgcaatctatccttatgcagcgtcatattatggttgatggaaaggtccgcactgacaagacctaccctgctggtttcatggacatca

SEQ ID NO: 6810 - DNA, 244 bp, Triticum aestivum
  Clone ID: uC-tsrow189004a01b1
tacacacatcatctcctccacctctctcaaccaagccaaggccaagagctcagtgaagcacccgcggccatggagggcaaggaggaggacgtgcggctgggcgcgaaccgctactcggagcaccagcccatcggcacggcggcgcagggcggcggcgcggacgagaaggactacaaggagccgcccccggcccccttcttcgaggccggggagctcacctcctggtccttctaccgggccggca

SEQ ID NO: 6811 - DNA, 297 bp, Triticum aestivum
  Clone ID: uC-tsrow189004a02b1
tgtccatgcaaggtattgtctcaattggagtgacagctgcaaaggtgcttgttgaagatatatcccatgaataccgccgtaggaggaaagaagagactgatgtagctcgaagtaggatagaaacatatgtaaggtcttcactccgtacagcttttgctcaaagaatggaagaagcagattcaaagcgatcatcgaggaaccctaccccagttatgtctatccttgcaaaggacattggtgacctagcaattaaggagaaaaatctgtacagtccaatattgaagacatggcatcccc

SEQ ID NO: 6812 - DNA, 316 bp, Triticum aestivum
  Clone ID: uC-tsrow189004a03b1
tggacgcgtgggcgcctccacacgagaagagagactcagcagcaacccacgccaagagcaggcagctccgtcctagcaccaaccaatggcgacgtcgcgggcggacgtggagaagggcgggtcgtcgccgaggaaggcgaagcaggagccgggcaaggtgccgtcgccgctgtacccgcagcacgagggggagcgggagtggacgccctggctggtgccctccatcctggtcgccaacatcaccgtcttcaccatcgccatgtactacaacaactgccccgcccacaacgccaagccggggcgcgacggccagtgc

SEQ ID NO: 6813 - DNA, 339 bp, Triticum aestivum
  Clone ID: uC-tsrow189004a04b1
tttgtacagggactggtactggaaggcgtacctgccggaggacgcggaccgggaccacccggcgtgcaacccgttcgggccgaacgggcggcggctcaggggcctgccgttcgccaagagcctcatcatcgtgtccgggctggacctcacctgcgaccggcagctgggctacgcggagggcctccgggaggacgggcacgacgtgaagctggtgcaccgcgagaaggccaccatcggcttctacctgctgtccaacacgaaccactaccacgaggtgatggaggagatcgccgagttcgtccgagctaacctcctgtagtacatacaccagcccagtcg

SEQ ID NO: 6814 - DNA, 289 bp, Triticum aestivum
  Clone ID: uC-tsrow189004a05b1
ttgtctggactgtgtagcgtgttgcaggagagaagcccaagctttggcggagccatggcggaggaaacgggggcgacggcggcttcagggccggcggcgggcggagagggcaagatgacgatggtggtcggggtggacgagagcgagcacagctactacgcgctgcagtggacgctcctccacttcttctccccgggccagcagcagcagtaccgcctcgtcgtcgtcacggccaagcccaccgccgcgtccgccgtcggcctcgccggaccaggtgccgcggacgtgc

SEQ ID NO: 6815 - DNA, 296 bp, Triticum aestivum
  Clone ID: uC-tsrow189004a06b1
tcttctgcccatcttggaggcatctctcaagtgtggctcagagaagaagaaactccaagcctgcgtggcgacgatgaagctggttcgaccagattagtacagccagcagtgtgcgatgtcaaccaccatgatgaatctgagctcggcgcggttcgttgcgagttgagacgggatctacaaactgaatctgtctccccgttgaagaccctctctgttaaaagactcacggaagaaacaaaatgagagaaatggcggagactgctcttcttcttgtcacaacaaagatcggaatagct

SEQ ID NO: 6816 - DNA, 91 bp, Triticum aestivum
  Clone ID: uC-tsrow189004a07b1
ttggcacgagatttcaccggccgggagcacacggtaagataaggacggtgagcgcaaaggagatcaccgtgactcgacgcaccatgccgtg

SEQ ID NO: 6817 - DNA, 293 bp, Triticum aestivum
  Clone ID: uC-tsrow189004a08b1
tcttccagctcaagctcaagaagcttcaccaatctccctagcaagctcaagaagcttcatcagctagattagattagcgcataacattcttggcctctccaatcctctgtctctgtctctactcagctagctaccagatccccggaaaccggagagcgcagatggcaagcagatccgccgagcttctctcgaggatggccgccggcgacggccacggcgagaactcgtcctacttcgacgggtggaaggcgtacgacatgaaccccttccacccgcaggacaaccgcgggggc

SEQ ID NO: 6818 - DNA, 278 bp, Triticum aestivum
  unsure (1)..(278): unsure at all n locations
  Clone ID: uC-tsrow189004a09b1
ngctgaaaaatttgtgattttggacttgctggggccaccttagaaactgattttatgactgagtatgttgtgacaagatggtacagggcaccagagcttctgttgaactcctttgaatatactgcagcaattgatgtgtggtctgtgggctgtatatttatggaactgatggatcggaaacctttgtttccgggaagggaccatgtccatcagctacgcctactaatggagcttattggaacaccaaatgaggccgatttggattttgtaaatgaaaa

SEQ ID NO: 6819 - DNA, 334 bp, Triticum aestivum
  Clone ID: uC-tsrow189004b01b1
tccacgcgtccgcgccgtctactgagtcactcctcgctcctcactcaacggccagcatctctgtctcgctggaaagaaagccttcaacaaggtggccaggaccagagaccagacagggaaggaggtgctgtgtgctctacctgtactgtaaaagattcatcccatggccgcggagtctgcctggtgctggccgtggctcagctccggcacggcgtggttcctcttcttcaacgtcttcgtcggcgccgtggccgtcctgtcctggcggcagggcagcgacccggagatgtcgaggcggaggaggctcacccggagcgcgtcgtccatggtcatg

SEQ ID NO: 6820 - DNA, 273 bp, Triticum aestivum
  Clone ID: uC-tsrow189004b02b1
tttcgcgttcggcagaacaccccgcaggacttcgtcaacctgcacaaccgcgcccgcgccgtggacggtgtcggcccggtggcgtgggacaacaacgtggccaggtttgcgcaggactgggcggcgcagcgcgccggcgattgccggttccagcactccggcgggccgttcggcgagaacatcttctggggttccgggcagtcgtggacggccgtcgacgcggtgaagctgtgggtggacgagaagcagaactaccatcttgacagcaacacc

SEQ ID NO: 6821 - DNA, 315 bp, Triticum aestivum
  Clone ID: uC-tsrow189004b04b1
gtctcgaccatcaagcttgttatgacgcactttgaatttccgagcaagtcgcagccttttcagattcatcaacacaggttacatcagtagtcaatatggttcggatgcataatagtacgtacttcatttcctttttgttgtgtacggtgacctacaacatggatcatatgtaccggttatctttcaggttcagtttgctgtggcgaattcttcttgaatttgttgcggcaaacttgtggtcatgtatggtttttagttttgtaagcatgcatagtttagaagttagaaagctcgttcatgtattgttctaaactg

SEQ ID NO: 6822 - DNA, 305 bp, Triticum aestivum
  Clone ID: uC-tsrow189004b05b1
ttttatcaccacatgcttggacatccaacggaggctcaagtatacggaggcatagtagatctcctaattacatgactgaagttagaattggtagaatgacttcacctcaaagacaacatcgattcaatgatcgagttatgcgtggtagtccatcaataaattccacttactctcaacatgattcaacatgggttgaaggaaggagctgctcaacactagatatttcttatcacaagaaacggtattctcggaggagcccacctctgagaatcacctcaagaaatgacatgttcgatttaatggat

SEQ ID NO: 6823 - DNA, 175 bp, Triticum aestivum
  Clone ID: uC-tsrow189004b06b1
ttgttggcgtgcgtggtgtttgctggtgttgtgtttggtgcgttgttgaggttacctcgctgagtttgttcaacccgtcgcgggtgcggcgatgagcctttcgctggtcgctgttattttcacaacggcttattccattgcgcgctttcgccgtcaactcattcgcgctcagaag

SEQ ID NO: 6824 - DNA, 231 bp, Triticum aestivum
  Clone ID: uC-tsrow189004b07b1
tgcggggcggtggcgcaccagatccggccgcggcggcgatgatgaagcagctgctgccgcagagccagctgcggcgctcggcggcggcgtcggcggcgcgctcctcggggggcggcgtcggggccgagggcgcgggtgggcccgacggcgtctgcgcgggcgcgggggcgggcgggcggaccgcctcctcctccaccttctggttcctgctccacgcgttctgctgcctca

SEQ ID NO: 6825 - DNA, 326 bp, Triticum aestivum
  Clone ID: uC-tsrow189004b09b1
tcttccacgcgtccgcccacgcgtccggggggcataattctttcagaagtgggtcccacagcaagtgaagatgcgctgaaccttatttcgtggctttgctcatgggacccacgtaaacggccaaccgcagtggaggttttgcagcatcccttctttcagccatgcttttatgtccccccttcacttcgtttcagatcgaccggatatgcaacaacaccaccatcagttggggctaaaggagctatggaccagaagaatgctaggcgataccctgtggggactttatccaatgggagaccggcagtcaataactcgtacttgagcac

SEQ ID NO: 6826 - DNA, 229 bp, Triticum aestivum
  Clone ID: uC-tsrow189004b10b1
taagccaaggccaagagcccagtgaagcagcggccatggagggcaaggaggaggacgtgcggctgggcgcgaaccgctactcggagcaccagcccatcggcacggcggcgcagggcggcggcgcggacgagaaggactacaaggagccgcccccggcccccttcttcgaggccggggagctcacctcctggtccttctaccgggcggggatcgccgagttcctggccac

SEQ ID NO: 6827 - DNA, 165 bp, Triticum aestivum
  Clone ID: uC-tsrow189004b11b1
tcatgaattcctcccacccccaccgtctggccgtcgtcaccacagctggataagaaaaaaagagagagcagaactcgttgggagtgctcgagatctgcgtcgggagagggggaattcttgagatcggaatcggaacaagcgggcgcgctcgggatcggggttacc

SEQ ID NO: 6828 - DNA, 264 bp, Triticum aestivum
  Clone ID: uC-tsrow189004b12b1
tttctcccacgcgtccgcccacgcgtccggagatgtttgccatccggtttggcaccgtggagaattgcaagaagtttaaggacttggttgacgagatcgctgagtcgcttgcaaagaatgagggcggtgaaagcgaagaaggttcttctgcggctggactgctggagaaacttagtgtaagcgaaagcaaacctgaggaaagtgcagctaaggaggaatcgactgatgctagcaaggagacagaaaccaaagccgcaacagccc

SEQ ID NO: 6829 - DNA, 290 bp, Triticum aestivum
  Clone ID: uC-tsrow189004c01b1
tttccaaccccagggaatgcactcatgaacttgaggtatagagatgaacgggcagcaccgatcgcaggaaaagaggtcagaacaggtttagaaggacctgggctttcagtttctcaaaagatcttgtactgtattagcactgttggtggccaatacttattgtcccgattgcaatccttttctgctttccgtcgatggggtgattcagaacagagaccactagcacatcgtgcttggggcatggtgcagcacgctgaaggactatacagagctgtttcattctttaacct

SEQ ID NO: 6830 - DNA, 260 bp, Triticum aestivum
  Clone ID: uC-tsrow189004c02b1
gtggcggctttggagggggtagctcgtgaggacgcatacaaagcgtggtgaagatgtggtgcataccatgaaggtttcgttagaagacttgtacaatggtgctaccaagaagctatctttatcacggaatgttctttgtggaaaatgcaagggaaagggatccaagagcggggcaacggctacttgcagtggttgtcgtggtgcaggaatgaggatgataacaagacagatcggacctggcatgatccaacagatgaata

SEQ ID NO: 6831 - DNA, 336 bp, Triticum aestivum
  Clone ID: uC-tsrow189004c04b1
ctgttgttggagctaccggattaccccaagttgaagcaaaatatccagctttgctctttaaacagcagcttgtggatctaattgagaaggtttacggtatgataagtgacagcgtgaagaaggaactaaaccctttacttgaattgtgcatccaggatccacgaacttctcactcaaatctggcaaaaagcaatacaaatggcttgggacaacagaaccaattagcacattggttaagcatcgtgaaagtcctcgccaactatttggatgtattaaaggcgaaccatgtcccatcaattttggtgcataaattgttcgtacagatattttcactga

SEQ ID NO: 6832 - DNA, 358 bp, Triticum aestivum
  Clone ID: uC-tsrow189004c05b1
ctctcgtgacctcctgtttccgcccaccttctccggctccggcgccggcgaacccaccgcggatcgagcgattcctccgatcaggagaggccagccgggaggaagagcacctacgcgggaggagaggagatggggctcacgttcaccaagctgttcagccgcctgttcgcgaagaaggagatgcggatcctgatggtgggtctcgacgccgcgggaaagaccaccatcctctacaagctcaagctcggcgagatcgtcaccaccatccccaccatcgggttcaatgttgaaactgtggagtacaagaacatcagcttcactgtctgggatgtcgggggtcaggacaagatcaggccac

SEQ ID NO: 6833 - DNA, 264 bp, Triticum aestivum
  Clone ID: uC-tsrow189004c06b1
ccctgataccaaagctcatcttcttctccttgaaatctttttgggtccacagatttggaggatgtcttgcaactgcggatcaggctgcagctgcggctcagactgcaagtgcgggaagatgtaccctgatctgacggagcagggcagcgccgccgccgaggtcgccgccgtggtcgtcctcggcgtggcgcctgagaacaaggcgggacagttcgaggtggccgtcgggcagtccggcgagggctgcagctgcggcgacaactg

SEQ ID NO: 6834 - DNA, 321 bp, Triticum aestivum
  Clone ID: uC-tsrow189004c07b1
tcgtccacgcgtccgcccacgcgtccgcgacatctctctcttcttaacgcccgtccaggtctcgccgccattgcgtcagggactctcggaaccccggttcttggacatcctcgcaggtctggttcgtctgccgggggctcctctcctctcgtggtcgatcctggttgagcgtcattgagttaaagggaacatgtttcggaaaaagcaagcttctcatttcgattcagatgatgctgagcagagacaagcaaagatcaaggaactaaaagctgcacttgggcctttttctgcccgtggaaagaaatattgtgatgaagcatg

SEQ ID NO: 6835 - DNA, 276 bp, Triticum aestivum
  Clone ID: uC-tsrow189004c10b1
ttctcctactctcctctcccatccctcgccccccctcctcgccgcaagctctaatccccccaagattagctccaacgaacacgaattactgtggattagtgcgaggctttggccgcggcaaatctggggcggggcggttggaagagtcgcggccgaattgtttggtcgagcagatgatgacggcgaacgcgaaactccagaagcaggcgctgctgccgccgcgtagcccgttcccgacggcagcgtcgccgtccccgtacgcagaccatggcccga

SEQ ID NO: 6836 - DNA, 262 bp, Triticum aestivum
  Clone ID: uC-tsrow189004c11b1
tagcacacaagaagctcatagccaatcaaagcctcttcatctccgaagctccaaccgaaccgaggatgtcttgctgcggaggaaactgcggcggcggcaccgcctgcaagtgcggcaacggctgcggcggctgcaacatgtacccggaggccgaggccgccggtgccaccctccttgtctgcgccaccgccacccacaaggcgagctccggcgggatggagatggcggccgagaacggcggctgcggctgcaaccagtgcaa

SEQ ID NO: 6837 - DNA, 195 bp, Triticum aestivum
  Clone ID: uC-tsrow189004c12b1
tttatggccgccctgttctacaagggcttggggctgttgatataattgccaaagaggttcttggttgggttcaattgatgccggtctatgctgctgagcttgtccagaatgttcgcacctttctggaacgttcacatgaaagatgccgggcctcatatatggaggctgcccttgagaaacaaagttatattcttc

SEQ ID NO: 6838 - DNA, 274 bp, Triticum aestivum
  Clone ID: uC-tsrow189004d01b1
gaggccagttgtggcgtgggtggcgtgtgtgcgtcttcctcctcctgatcccctctttctctcaaaccagatgtagctcgaattcatgttcatggagtaaattcgaagactagtcctaacaatctgcctccaaaatccactatatatatgcccccttcgagctaaataacccttcatccaaacaagccaaggcaagctactagccagtacttggagaaaccaacaatggcgccgctcgcagcccggagccggaggccagcctgcctcctagccc

SEQ ID NO: 6839 - DNA, 279 bp, Triticum aestivum
  Clone ID: uC-tsrow189004d02b1
tgttcacgcgtccgcccacgcgttcgcccacgcgtccgcccacgcgtccgcccacgcgtccgcgcgccgccgcagccatggtgaagtactcgacggatcccgccaatcccaccaagtccgccaaggccatgggccgggacctgcgtgttcatttcaagaacactagggaaacagcgcttgccctgaggaagatgtcgctcaacaaggccaagaggtaccttgaggatgtgttggcacacaagcaagccatccccttccggaggtactgccgtggtgttg

SEQ ID NO: 6840 - DNA, 310 bp, Triticum aestivum
  Clone ID: uC-tsrow189004d03b1
ttagaactggttgaactcccactgcgtcaccctcaacttttcaagtctattggtgtgaagcctccaaagggcatattgctgtttggaccacctggctctggcaagacccttattgcgagggctgttgccaatgagacgggcgcattcttcttcctgatcaatggcccagaaattatgtccaagttagcaggagaaagtgagagcaatctcaggaaggcatttgaagaagcagagaagaatgcaccatcaatcatcttcattgatgagattgattcaatagccccaaagagagagaagaccaatggagaag

SEQ ID NO: 6841 - DNA, 367 bp, Triticum aestivum
  Clone ID: uC-tsrow189004d04b1
tctctcggcggctgtgccctggtggcgcggtgatggcctcgggcgtcccggtggtgcgtgcacggaggttctggtggctccgcgtcgacgctccggctcgtgcggtcggtggcgtcacgggcatcctgtgtcgctcggctgcggggatggtccgacggcggtggcctctgtgcggcgcgggtggtggtcccaggcggcggtgcttccccgggctcgccccgatctgtctccgcctgggtgtgctgcggcatgcgcagctggttctgggcggttccgtctcagatccgctaggggcgtccctttcctgcacctgctgcagctcggctccccctctcgcttgcgtgtgtacggcgtgggtgccctggag

SEQ ID NO: 6842 - DNA, 351 bp, Triticum aestivum
  Clone ID: uC-tsrow189004d05b1
ctggccgccggccatggaaatggagccgggcggtcctagttcgaagaaagttaagtcagcggccgtcaacagccgccaagaggcacaggcgccgccgacgccggcgtcgccggcaactgaagccccctgtctggaccctgcagagacgccgcccgcagctgatgaagatgatggacgcgtcgaccgcatcagcaacctccccgaccccatcctcggtgagatcgtctccctcctccgcaccaaggacggcgcccgcacccagatcctcgcgtcccggtggcgccacatctggcgcaccgcgcctctcaacctcgactgccgtcgtctccccgacgaggagcacgggctcac

SEQ ID NO: 6843 - DNA, 411 bp, Triticum aestivum
  Clone ID: uC-tsrow189004d06b1
tctctcgcgtccgcacgttccgatttggccaaagagttctcttttgaggaatttataaaggtctgcttaatgcactttttagaatgtttacctgaatcatagaaactttatcaaataatactatatatgcaagtttgttcccgtgatcctgtttattactttgtttcttcagttgtttataatggacaaacactgcagttctccctttttctagtgtgggtactggtgccagcattagaaacatgacagtaccttttttagaaaatagagtttgtagattagaataagcaatgtagtattgatattaattccttgggtagtgggcagtttatgtgataatatagtaactatcgtattactcaccatggctggttacccaaagaacatcttgtggtaggtatgcagcataaa

SEQ ID NO: 6844 - DNA, 310 bp, Triticum aestivum
  Clone ID: uC-tsrow189004d07b1
tcgtccacgcgtccgctgaagttataaagtggatggagcgctttgattgcattgttgttggccccggccttggaagggactcatttcttatggattgtatcagtaatatcatgaggcatgcacgacaggctaatatcccaactgttgtggatggggatggccttttccttataaccaataacattggtcttgttgaagacaactcacttgccatcttaacaccaaatgtatacgagtacaagcgtcttgtgcagaaggttcttaactgtgaagtaaatgaggaaaatgcttctgagcaactgactgcact

SEQ ID NO: 6845 - DNA, 265 bp, Triticum aestivum
  Clone ID: uC-tsrow189004d08b1
ttctgcgcaacacgcgtccatctccaagaagcggaagctagtggagcagagcaaaccaagcaaggttggatggcgccggcggtgaaggtgtacgggtgggccgtgtcgccgttcgtggcgcgcccactgctgtgcctggaggaggccggcgtcgagtacgagctcgtgtccatgagccgcgcggccggcgaccaccgccagccggacttcctcgcccggaaccccttcggccaggtccccgtcctcgaggacggcgacctcaccc

SEQ ID NO: 6846 - DNA, 319 bp, Triticum aestivum
  Clone ID: uC-tsrow189004d09b1
tcgtacgtatgcaattgacacaaaaagctggcgtgagggatactcgcgaaatctgcctggagcgaccctccaaaatctgtatttacggaagagtatggctgattctcgatgtcaatcctcgacagaacatgggtataaattctgtcaagagtatacattacctaacaaacaaccacaacaacaatacaaactcgaagatccagagtgggtggcagatgatgcccgcctggctagagcacaagatcgtctacgcaattatttgcgttcacagcaacccgaagaatttgatgtctttccggaatctctccgtttggagtta

SEQ ID NO: 6847 - DNA, 283 bp, Triticum aestivum
  Clone ID: uC-tsrow189004d10b1
tttggacgcgtgggcggcaccggcggcgagtccatctacggcgagaagttcgccgacgagaagttcgtccacaagcacaccaagcccgggatcctctccatggccaacgcgggccccaacaccaacggctcccagttcttcatctgcaccgtcccctgcaattggctcgacggcaagcacgtggtcttcggcgaggtcgtcgagggcatggacgtcgtcaagaacatcgagaaggtgggctcccgcagcggcacctgctccaagcaagtcgtcatcgccgact

SEQ ID NO: 6848 - DNA, 283 bp, Triticum aestivum
  Clone ID: uC-tsrow189004d11b1
ttctggtcgctccaagcacgggaggatccatgggcgtggtgcgagccgtgtgatccacaagagtgtgcgtgcacgtaaggatgtgcttcggctgccgtgtccccgccaagctctggtggtgagagttcgaggacaggccgcgcacgtacgtacgtgtgatcagtacattccatactgctgtgccgcccgtgtctagcttcttgccggcggtcgacatgtggggcgacgtggtggcgctcgtccggcagggcctgcggtggcggcggcgcatggggaggaggtc

SEQ ID NO: 6849 - DNA, 186 bp, Triticum aestivum
  Clone ID: uC-tsrow189004d12b1
ttggacgcgtgggcagactcgcgtctccggggcccttgcaccggcaccgcacatagcgcgcgcggtcgagagagatggcgtacgcggcgggctcgccggcggtgccggactggctgaacaagggcgacaacgcgtggcagctgacggcggcgactatggtgggcatccagtccatgccgggcctgg

SEQ ID NO: 6850 - DNA, 161 bp, Triticum aestivum
  Clone ID: uC-tsrow189004e01b1
tctgacgcgtgggtggtggcgctgtgccaggccatcgaccttcgccacctggaggagaacatcaagacctccgtgaagaactgggtgacgcaggtgtcgaagaaggtgctgaccatgaaccccaccggggacctctgcagcgcgcgcttcagcgagaagag

SEQ ID NO: 6851 - DNA, 318 bp, Triticum aestivum
  Clone ID: uC-tsrow189004e02b1
ttcgacggccacggccagtggggccactacgtctccaaggccgtccgggactcgctgccgccgtcgctgctgtgccgctggcaggaggccgtcacgctggcgtcgctcatcgacggcgagaagaagctctgcgactcccagttcgacctctggaagcagtcctacctggccgccgccgctgccgtcgacgaagagctccgccgcaccagccgcctggacgcggtcaacagtggctccactgctctgtccgtcgttaaaaagggtgacacgatggtgatcgcgaacgtgggcgactcccgagccgtcctggggaccacg

SEQ ID NO: 6852 - DNA, 331 bp, Triticum aestivum
  Clone ID: uC-tsrow189004e03b1
tctcgctgtctttttcttcacttccccctcgccttctcctgccctcccctcctgatcggagtctcagccgcggcagccatggcgaagacctaccccgttgtcagcgccgagtaccaggaggccgtcgagaaggccaggcaaaagctccgcgccctcatcgccgagaagaactgctccccgctcatgctccgcctcgcgtggcactccgctgggaccttcgacgtgtcgtccaagacaggcggcccgttcgggacgatgaagaagccggcggagcaggcgcacgccgccaacgcgggcctggacatcgccgtgcggatgctcgagcccatca

SEQ ID NO: 6853 - DNA, 318 bp, Triticum aestivum
  Clone ID: uC-tsrow189004e04b1
ttttcctcccctgcctgccaacccccaatctcccgtcgcagccctcgaatctccccccgagcatcgaccatgtcggcctactgcggcaagtacaaggatgagctcatcaagaacgctgcctacattggcacccctggcaagggtatccttgctgctgatgagtccaccggcaccatcggcaagcgcttcgccagcatcaatgttgagaacgttgaggacaaccgtcgtgccctccgtgagctcctcttctgcacccctggtgccctccagtacctcagcggtgtgatcctgtttgaggagaccctgtaccagagcacc

SEQ ID NO: 6854 - DNA, 409 bp, Triticum aestivum
  Clone ID: uC-tsrow189004e05b1
tttccggtgccggagggcttgcagttcgtgctcaacactttaccggttgacccaagctgcattggggatggtgatggcttcactgctcatgtgaaggagatggcaggtgatacaaacaaccgagatccaaagcaataccgaataagaatgagagggattgatgcaccggagctgaacatggaatatgggaagaagtcaaagaaagggttggtgaagcttattggagagaaatgcgttgagattcatgtgtatgggatggaccactttgatcgatatattggcgacatctactgtgacggcgtctttatccaagaacaaatgctgaaaaggggcttggcctggcacttcaaaaaatatgacaaacgtcctgaattcgcacaatgggagagagaagcaaaaatggcacgtg

SEQ ID NO: 6855 - DNA, 303 bp, Triticum aestivum
  Clone ID: uC-tsrow189004e06b1
ttctcgcgtccgccacgcgtccgcggacgcgtgggcggacgcgtgggtcgcgcttcgctctcagatcccttctcctccgtctcgcccgcgtgttggggtaggagccatggcggaccagctcaccgacgaccagatcgccgagttcaaggaggccttcagcctcttcgacaaggacggagacggctgcatcaccaccaaggagcttggaactgtgatgcgctcgctggggcagaaccccactgaggcagagcttcaggatatgatcaatgaagtggatgctgatggcaatggaacgattgactt

SEQ ID NO: 6856 - DNA, 287 bp, Triticum aestivum
  Clone ID: uC-tsrow189004e07b1
tcttggcttctcctccccactcagtcctgggttcccggcccggttcggttcgttagggtttagtagtggggaagaggaggaagaatggcggacgtcgagtaccgctgcttcgtcggcggcctcgcctgggccaccgacgaccagtccctccagaacgccttctccaagtacggcgacgtcatcgactccaagatcatcactgacagggagacgggccgttcccgcgggttcgggttcgtcaccttcgcgtcggacgaggcgatgcgccaggcgatcgaggccatgaa

SEQ ID NO: 6857 - DNA, 250 bp, Triticum aestivum
  Clone ID: uC-tsrow189004e08b1
tctcccctgtgctcgtgccctctcctctcccgccccgagctccactgcctccagcctacgctcgcgctccgtcccttcctcctcgttggtgctcaatcggacgagcgtgagctgcggcaaactgcagcggagggaaacgtggatgaggagatcaagccaagctggtgcacgagctcgcactgccctggcgccgatctcgcgccggtcctacgccctgccaccctctctcgggacgccatggagatcaaca

SEQ ID NO: 6858 - DNA, 315 bp, Triticum aestivum
  Clone ID: uC-tsrow189004e09b1
tcgtccacgcgtccggcggaggactgccgccgcgcctgatataggatggcgatggccatggaagtgctcgctcgacttgcttgtgtgttctgcgccaccattcttttgcagagcctggcatggccctgcagcaatggagagagaggcttctcctacccccagtctccaaaggccccctccattgtcagcgagaggtacaggactgcctaccacttccagcctcccaggaactggatgaacgatccatgtggaccaatgtactacaatggcgtctaccatgaattctaccagtataaccccgatggcgcctttgac

SEQ ID NO: 6859 - DNA, 301 bp, Triticum aestivum
  Clone ID: uC-tsrow189004e10b1
ttacacatcatctcccccacctctctgccaaagccaagagctcagagaagcaccggccatggagggcaaggaggaggacgtgcgcctgggcgcgaaccgctactcggagcaccagcccatcggcacggcggcgcatggcggcggcgcggacgagaaggactacaaggagccgcccccggcccccttcttcgaggccggggagctcacctcctggttcttttaccgggacggcatcgccgagttcctggccactttcctctttctttacatctcggtgctcaccgtgatgggcgtggtgggc

SEQ ID NO: 6860 - DNA, 338 bp, Triticum aestivum
  Clone ID: uC-tsrow189004e12b1
tcccacgcgtccgcccacgcgttcggctgaggcagaccaggaacggccgccccacggggtcctgggagccgatgcgccgctcctggggatccatctggcggatggacaccagccgcccgttgcaggggcccttctccatgcgcatcaccagcgactccgggaagacattggtggccaacaatgtcatcccgacctactggcggccggacaaagcctactggtccaacgtccagttctattgattttggctcaatcatcagttgcatgcttctccgacggattccgatcgagagtccatgctccacattagcattaaaagaaattaaaaacaacctaac

SEQ ID NO: 6861 - DNA, 259 bp, Triticum aestivum
  Clone ID: uC-tsrow189004f01b1
cctcacgcgtccgcgatggaggggccgtcggtggaggtgccgccgtacttcctttgcccgatctcgctggagatcatgcgggaccccgtcacgctcgccaccggcatcacctacgaccgctgcagcatcgagcgctggctctccgacggccacgccacctgccccatcacgcagcaaaagctcgcggaggccgaccgggaggccacgcccaaccacacgctccgtcgtctcacccaggcctggtgcgctctgcacgccg

SEQ ID NO: 6862 - DNA, 350 bp, Triticum aestivum
  Clone ID: uC-tsrow189004f02b1
ctggctgcatgggtgtgaaggttcttcaggagaagaaagttctggaggttcacgttgagaaggggatgcaacacaaccagaagatcaccttccctggtgaagctgatgaggcgcctgacactgttactggagacattgtatttgtcgtccagcagaaggaacacccgaagttcaagagaaagggcgatgatctcttctatgagcataccatatctctcactgaagctctttgtgggttccaactcgtcctgacccatctggacaacaggcagctgctcattaaatcaaaccctggtgaagttgtcaagcctgattcattcaaggcaatcagcgacgaggggatgccgatg

SEQ ID NO: 6863 - DNA, 370 bp, Triticum aestivum
  Clone ID: uC-tsrow189004f03b1
tatgaccgagatgcacattttggtccagtccaccatggcctcaaagtccaactcctccaactccaactccaactccaactccaacgggggcagcagcaagggcggtaacggcgggggtaacatcgcgtcaaagcagcataatgcatcactgtcagggacaaccacaaggggcagggagttcgaggaccccgagacaaaggcttacatgaaggccaacgccgccaaggctctgtggcacctcgccaagggcaatgcagctatctgcaagagcatcaccgagtcaagggctcttctatgcttcgcggttcttctggaaaagggggaaggcgatgtgcaatacaattctgcgatggctctcatggagatctgc

SEQ ID NO: 6864 - DNA, 301 bp, Triticum aestivum
  Clone ID: uC-tsrow189004f04b1
tctcgcgtccgcacgatctgaaaaaatcgacaaaacatgtcgtcggagaaacaggagacggcgtcggtgcgcgtgctgggcaggtggccgagcccgttcgtgatccgggtgctgatagctcttgggctcaagagcgtggaccacgagctcgtggaggaggccgtgggcaacaagagcgagctgctgctcgcctccaaccccgtgcacaagaagatccccgtgctcctgcaccacggcaggcccgtctccgagtccctcatcatcctccagtatgtcgacgaggcctgggcctcccaagccc

SEQ ID NO: 6865 - DNA, 326 bp, Triticum aestivum
  Clone ID: uC-tsrow189004f05b1
ttctcgtccaatatgcaaggttgctgattttggtttatcaaagatgaaacaagccaccatggtttctggtggaatgagaggaactcttccatggatggccccagaattgttgacaatgagcggcaccaaagtatctgaaaaggtcgatgtctattcttttggtgttgtgatgtgggaaattctcactggtgaggatccatatgatggcatgcactatggaggagttatagggggcattttgagtgacacactgaggccgtcagtgcccacttcatgtaacccggaatggaagaaactcatggagcaatgctggtcaactgagcctg

SEQ ID NO: 6866 - DNA, 294 bp, Triticum aestivum
  Clone ID: uC-tsrow189004f06b1
tttacctagaagtgtcgtttctccttcggccgccgccgcctgttgttccccttccctgttcatcgtccgtctccaactgatccgcccggcgatcgtcagatccatctgagaaaatccgctccagttaaatccaatccagatggagctagctaggatggatccacccggcgtcgagctccccaagagctgcctcctcgctatcaagcctgtggtcgccgattcaaccaacgccaccaccgccacccaccagacggagcacccggatgactctcgcgagatctccattcaggtcag

SEQ ID NO: 6867 - DNA, 273 bp, Triticum aestivum
  Clone ID: uC-tsrow189004f07b1
tctccacgcgtccggtgacagccgccggcgccgatctgaccagcctcgcttcgcctgcctcgtacgcgcgccggggaaagggaaagtgaaaagggaagaggatcaggggaagatgtgctgctgttgcggcggcgacgaccgcgaccacgagcacggctgccgcccgctcgggttcctgctcggcctgcccttcgcgctcctcgccgtcctcgtctccatcgtcggcgccatcatctggatcatcgggctgcccatctcgtgcatctgcccgtg

SEQ ID NO: 6868 - DNA, 250 bp, Triticum aestivum
  Clone ID: uC-tsrow189004f08b1
gtcttaccaattgcagagaggccattctaagctgagtcaaaattgcaacatcatgcagctgtaaatattgtgggtgatggcttcaattggaggaaatatggtcagaagcaagtgaaaagtactgataattctaggagctactatagatgcacaaattcaagttgcttggccaaaaagaaagatgagcattgtcctgatggccgtgttatacaaatcatatatcgaggagcacacagtcatgaaccaccac

SEQ ID NO: 6869 - DNA, 329 bp, Triticum aestivum
  Clone ID: uC-tsrow189004f09b1
tcttgccgtcccgcagggcacctacgcgcgcatcgtgccgcggtcggggctggcgtggaagcactcgatcgacgtgggcgcgggcgtggtggacgccgactaccggggccccgtcggggtcatcctcttcaaccactcggacgccgacttcgccgtgaggcccggggaccgcgtcgcgcagctggtcatcgagaggatcgccacgccggacgtcgccgaggtggacgacctcgacgccaccgtcaggggcgagggcggcttcgggtccaccggcgtctgatggccggccttgacggaaggcgaggcaggtgtgtctatctagatgctga

SEQ ID NO: 6870 - DNA, 378 bp, Triticum aestivum
  Clone ID: uC-tsrow189004f10b1
tctccgtccctcctcgcgcgtcgtgatccatccagcccaggtgattaaggtcgccatgtcggactccgaggaccaccacttcgagtccaaggcggacgcgggggcgtccaagacctaccctatgcaggccggcgccatccggaagggcggcttcctcgtcatcaagaaccgcccctgcaaggtggtggaggtttctacctcgaagactggaaagcatggtcatgctaaatgccactttgttgccttagatatattcaatggtaaaaagcttgaggacattgttccttcatcccacaactgtgatgtgccacatgtggaccgcactgagtatcagctgattgacatatcagaggatggatttgtgagccttcttactga

SEQ ID NO: 6871 - DNA, 329 bp, Triticum aestivum
  Clone ID: uC-tsrow189004f11b1
tagggttctacatggagctggtgagattttataccctataatgaaatgactaaaatgccctcggcgtggcacgagaattacaggcggtggcacgagatcttttacagcgggaggtaactatttattgtagcagtgttaccgggtcgatccaacggccgaggtccttcagtggcctgatctgacggctgaaaacgcatcaaacaagagatccgacggccagaaatcgctgagctatgaggaggcccatgttctaccaacaaacatacccacatacacacacatgaatgattacgtagaaagaaatattccagggaatgtcatgatgcaca

SEQ ID NO: 6872 - DNA, 331 bp, Triticum aestivum
  Clone ID: uC-tsrow189004f12b1
tttggccttcttcctctcgaaagctcttctgggttccagctcccttgagagtctccctcggtggaccgggctgatctgatgcccttctcggcggcgatgccggccggaagaggctaaggagaggcgccggatataggtctgtacatagtagttccaataaaattagtttagtgatgtgtttcaggagtagtagtgcctccgtggcgactggcgtgatgtcgtcaggaagcgtgccgccggcgtcttcgagcaacgctcggtggcttcaggttgctgccctgctgtttctgctgttctggggagagctagcacatggcggtggcagagctga

SEQ ID NO: 6873 - DNA, 274 bp, Triticum aestivum
  Clone ID: uC-tsrow189004g01b1
tcctacgcgtccggatgtcttcagctttggtgtcattttgatggagctggtcacgggacgcagggcgcttgatgacacacagcctgaggatagcatgcacctggttacatggttccggagaatgcagctcaacaatgatacgttccagaaggcaatcgacacaactatcgaccttgatgaggagaccttagccagcgttagcacggtcgcacagctcgcgggtcactgctgtgctagggagccacatcagaggcccgacatgggtcatgccgtc

SEQ ID NO: 6874 - DNA, 241 bp, Triticum aestivum
  Clone ID: uC-tsrow189004g02b1
ctccacgcgtccggcttcttgatcggggttggttgggtgttgtatgagagggagtgagcgggcagcggtgccagcgtcaacgtcggggatgagctgcaacggctgccgcgtgctgcgcaagggctgcaacgacgcctgcgtgctgcgcccctgcctgctctggatcgaggccgccgacgcgcagggccacgccaccctcttcgccgccaagttcttcggacgcgccggcctcatgtccttc

SEQ ID NO: 6875 - DNA, 279 bp, Triticum aestivum
  Clone ID: uC-tsrow189004g03b1
tctttacgcgtccgcagtgatattgttcagatggcaagttatgcgccactctttgtaaacgacaacgatcaaacgtggaatccagatgctatcgtcttcaactcctggcaacaatacggaactcctagttactggatgcagaagtttttccgcgaatctagtggtgccatgattcatccaattacaatcagttccagctactctggttctctagcagcatctgctatcacctggcaggattccgggaacagcttcctgaaagtaaagattgtgaacttc

SEQ ID NO: 6876 - DNA, 362 bp, Triticum aestivum
  Clone ID: uC-tsrow189004g04b1
tctcgcgtccgcctcttcctcctccctctctgttcgcactaaccaatccgagtacaactcgccgtactcgcacgcacacataggcagatccaatccgactgtacaaaagcgccgccgtccgccgctcacgtggaagagggagagggagcagcggagaggagaaggatttccacgattacatgcaacctcctggaatagtctagttcctaaatccttcttccattctggcagatatcaagagatcattcaggtctcgcacctctgagtgggtgtggatttgcaacaattctgcaatcaacttattgctgcctctgggagtaatcccatcatacatctggagattacggcgagcactggaggga

SEQ ID NO: 6877 - DNA, 372 bp, Triticum aestivum
  Clone ID: uC-tsrow189004g05b1
tctctcgccatttgccaacagacctcagatctcgctctcgcctccttgcgcagccgtcgtcgagagcagcaagaaaatggcggcgagcaacctcgagggtgtgctcctggggatgggcaacccccttctcgacatctccgccgtcgtcgacgaggccttcctcgctaagtatgatgtgaagccgaacaatgccattcttgccgaggacaagcacttgcccatgtacgatgagttgtccagcaaggacaatgttgaatatattgctggaggagccacgcagaactctatcagggttgcccaatggatgcttcaaactcctggtgcaacaagttacatgggttgcattggaaaggacaagtatggtgaggagat

SEQ ID NO: 6878 - DNA, 355 bp, Triticum aestivum
  Clone ID: uC-tsrow189004g06b1
tctcgcgtccgtgccattaacgcctacgctttcaaggatcgagcacgtataaactacgagcatctctaaaatttgttatctcgccgggatgatttcgaggtctcccagcctcttccagatcggcgagggtgaggcccaggatcaggatcaggcggggacgccaacaatggcgaccgccggcgagctcgtcgggctccggctgatcatacagccctcaccggggcgacaacaacggccggcgctggccgtcctcaggaggtcgtcggtgaggtccccggcagccgacctccaggagaacagcggctgccggccgttcgtgggcctcgagttcttgaagtgctgcctctgctgctgc

SEQ ID NO: 6879 - DNA, 306 bp, Triticum aestivum
  Clone ID: uC-tsrow189004g07b1
tgcactgtttccctcggttcttggaggaacatgtgctattcctggagctttcggttgtggaaaaactgtcattagtcaggcgctctcaaagtattccaattccgacactgtggtgtatgtgggctgtggagaaagaggaaatgagatggctgaggtcctcatggacttcccccaattgacaatgacgttgcctgatggacgtgaagagtcagtcatgaaaagaacaacgcttgtggctaacacctccaacatgcccgtcgccgctcgtgaagcctccatttatacaggaattaccattgctgaata

SEQ ID NO: 6880 - DNA, 331 bp, Triticum aestivum
  Clone ID: uC-tsrow189004g08b1
agatgggagtttagcaatccaactcctttcataaggagccgtgaatttctttggcaagaaggccatacagtttttgcaactaaagaggaggcagatgaagaggtcctccaaatattggaactctacaggagaatatatgaagaatttttagcagttccagtgtccaaagggaggaaaagtgagatggaaaagtttgctggtggactttacacaaccagtgtagaggccttcattccaaatactggccgtggtatacaaggtgcaacttcacattgtcttggtcaaaactttgcaaagatgtttgatatcacttttgagaatgaaaagggtg

SEQ ID NO: 6881 - DNA, 346 bp, Triticum aestivum
  Clone ID: uC-tsrow189004g09b1
ttttctggacctggacatgccggccctgcagtacatgatgagggagtaccctgggaatgaagaggagaagatgagagctgcaattggcaagtttggcctgtcaggaaaggcacaggtgatgccaatgaaaaacctgtctgatgggcagaaggcccgtgtcatttttgcttggctagcatttaggcagccacagatgctgttgcttgatgagccgacaaatcatcttgacattgagaccattgactcacttgctgaggcactgaaggaatgggacggggggttggtcctggtgagccatgacttcaggctgatcaatcaggttgctcaagagatctgggtctgtgag

SEQ ID NO: 6882 - DNA, 379 bp, Triticum aestivum
  Clone ID: uC-tsrow189004g10b1
tggaaatatccctccaggactcagtaattgctccatgctgaaactcctcggcgctggctacaacaacctcaatgggactcttccagacgagctcttcaaagttacctcgttagagcacctctctttgcctagcaatggcttagaaggagctatcaatggcatcagcaagctcacaaatctggtcgcccttgatcttggggggaatgagctcactggcagtattccagagtctattggtgagctgaagagattggaggagctgcatttggaacacaataacatgtcaggggagctgccatcaactctgagcaactgcacatatctcgtaacaattgacctcaagagcaaccagttcattggagaacttacccaggtcaac

SEQ ID NO: 6883 - DNA, 322 bp, Triticum aestivum
  Clone ID: uC-tsrow189004g11b1
ggttctgataaattgtgctctttcaagaccacccctggccgtggaggttacataaaggaagtggtcatctcagatgtagaaatggatggtatccgtgtggccattgaattcataggtaatttatcaagccatccagatgatgattttgatccatctgagctcccggtgattgatcaaatcaccctaaagaatatggtgggaacaaacatctcggttgcaggagttttatcaggaattgacggtgatccatttactgcgatctgcctttccaatctcagtttctcgataactgattcagcctattctactccctggtcttgtt

SEQ ID NO: 6884 - DNA, 267 bp, Triticum aestivum
  Clone ID: uC-tsrow189004g12b1
tctcgcatcgctgccatcgcctccgctccggaggtcgctttcacctcatcccgcgcgtcgccgccgagaccctctgcaaccggcgacgcggtgccggccgggcatggccaccccctcccccggttatatcttctcggctgccccgccaccatttttccccttttgatgaagagaaatgccaccctctttttccctgtgctggaaccggcgggggaattgcttcaaccgacgggcggatttgcttcaaccggcaaggatggtggtggg

SEQ ID NO: 6885 - DNA, 215 bp, Triticum aestivum
  Clone ID: uC-tsrow189004h01b1
gatctacacgagacgaacatgtcgtcttaggctcggacgttgttggtcgccggcttggcctgcaagaggatgcccccctgctctgacttgctcacatctcagtgtttcaccaatgaagatgtattttcaaggtgaaggccttgcgttgggactctgtgcctcctaaactaagaacaaatgaacttgcctttaggcttttcgcactgcactatgca

SEQ ID NO: 6886 - DNA, 184 bp, Triticum aestivum
  Clone ID: uC-tsrow189004h02b1
atgtttgtgcaggagctccgtgttgtgctgccaaaggaggtcgaggctgcccgcagtgctgtggagaatggcaccgctgcgcatcagaaccgtatcaccgagtgccggtcatacccgctttaccggttcgtacgcaaggagcttgggactgagtacttgactggggagaagacacgatctcctg

SEQ ID NO: 6887 - DNA, 311 bp, Triticum aestivum
  Clone ID: uC-tsrow189004h03b1
ttttccccctcccacgccgtctcgtcccagctcgccctccagaggttttagtcttcctccatggcggccctcatcaagctcggaagccttcttaggcagagtgctttggcgagcagtgcctcgaccggctcggctcctgccctgttcaacgctgcccgcttcatgtgcgccggccagcccgctggtggcaataagcttttcgtcggcggtctggcctgggctactgacgatcattcgctgaaggaggcgttccaaagctttggagaggtcgttgaggcacgtgtcatcactgatcgagagactggaaggtc

SEQ ID NO: 6888 - DNA, 312 bp, Triticum aestivum
  Clone ID: uC-tsrow189004h04b1
tattcccccctcccacgccgtctcgtcccagctcgccctccagaggttttagtcttcctccatggcggccctcatcaagctcggaagccttcttaggcagagtgctttggcgagcagtgcctcgaccggctcggctcctgccctgttcaacgctgcccgcttcatgtgcgccggccagcccgctggtggcaataagcttttcgtcggcggtctggcctgggctactgacgatcattcgctgaaggaggcgttccaaagctctggagaggtcgctgaggcacgtgtcatcactgatcgagagactggaaggtc

SEQ ID NO: 6889 - DNA, 324 bp, Triticum aestivum
  Clone ID: uC-tsrow189004h05b1
tttctactggtggcccgggttcccggcggagctggcggcccgggagtacggccggcaggagcgcggcgaccagtgggcgctgcgcgtggcgcaccacgcccccggcatcatacactggtggatggagcagagctggctgcccctgcccacctccaccgtcgacgtgaacaccacctacctgccaaacaagcgcgacgccgagatccgacgaaccctcaccgtcgacggaaccctccggaagaagagggagatggcgacgcaccaggggatccaggagtcgtactacagggacatggccgtcatgttcggcaagtgggagttcga

SEQ ID NO: 6890 - DNA, 326 bp, Triticum aestivum
  Clone ID: uC-tsrow189004h06b1
ttcacgcgtccgcccacgcgtccgcccacgcgtgcgcacggatcggatcggatcagatcagatcagatcaccatgagctccaacgttcaaggtgagggtgaagtccccgtctacgaatcgggtgcagatgccctgcagaagctgcaagagaaatggaagtccacggcggcgccgtacccggccatgtactcgagcttcttgggcgggatcatcctggacccggccatgatggccctccccatcgacgaccacatggtccaccgcggccacggcgtcttcgacacggccatgctcctcgacggtcacctttacgagctcgacacgca

SEQ ID NO: 6891 - DNA, 187 bp, Triticum aestivum
  Clone ID: uC-tsrow189004h07b1
tcgtcgtgcgccgttcgttccgcgagccgagccgagtcgagcgagcgggcgggtggcgggtggtgggttttggcgaccggattgcatgaaaaccagcgccgccgccgccgccgtcgaggagctcgagctgctcgcccggggggccttcgtgggcgccggcatggaccgccacgacctgggcgcgtcc

SEQ ID NO: 6892 - DNA, 336 bp, Triticum aestivum
  Clone ID: uC-tsrow189004h08b1
tcttcaactgtttcatactatggttttgtgagtgatgtcctggaactttccgagaaataccagaagagatttggccctcttcgatattttgtggctggagtactcaaatttttgtgtctaccaagttacttctatgagttagaatatcttcctttgtccaaggacatgtccgggcatggaaaaggtacaggacaagacaaagttgaattgtctgatgtctatacagatgtaatgcgcagtcgatcaaaaagagaaggatttccacgagctgtcagcttttcaagtattgactctatcatgactccaagtaggatgtctctaggggactttgacaca

SEQ ID NO: 6893 - DNA, 245 bp, Triticum aestivum
  Clone ID: uC-tsrow189004h10b1
tctcggacgcgtgggcctcccgcacgcttgtggtccgttctccgccccgcctcgagcagctcagggacgcgcacagccatggcgacggagaccgagaccttcgccttccaggccgagatcaaccaggtcctctcgctcatgatcaacaccttctactccaacaaggagatcttcctccgcgagctcatctgcaactcctccgatgccttggacaagatcaggttcgagagcctcacggacaagag

SEQ ID NO: 6894 - DNA, 391 bp, Triticum aestivum
  Clone ID: uC-tsrow189004h11b1
tctttgcagtgctggtgttgaggagtcggtggagatatcttcagaaaaagttaccagcagatccaagactcaggaagacttaatcaagtcaatttataatttctcagtagtgcttctatctacttgcgatggcggttatgagttggaggaatctgaacatgcacttgttcaatctacaatacacaatctcagttctttgagttccaagataagcaaggctgcattaaaaaatgatgatgtaaatggaaactgctgccaaacaaaatcagatacaaggtgccatggaaagaatcatcagcctcagaagtttgatggacttgactgggagaacattggtgcagattttaaaacatttattttggaggatcttactaaacttccagaagagaat

SEQ ID NO: 6895 - DNA, 397 bp, Triticum aestivum
  Clone ID: uC-tsrow189004h12b1
tccacgcgtccgggcatctccagcattgggtggtcagtatgaagcccccatgttaggaggatcaatggcaaaagctccaagtacaccttggatgcctttttccatgttatttgctgctatttcaacgaaacttcctcgtgagaaaatggacatgatcaataactgttatgaagaattcaaggccaagaaaataagcagaattgacctagtgaagaggctgcgtctcatagttggtgacagaatgctggtatccacaataattcggctccaagataagttgcctccgatggcgaagcgggaagcagcaaatgctccagccaaggcacgaggtcagtgaccatggtggattggaggaaggaactggtcgacttgttatcatgagttggaaaggaatgta

SEQ ID NO: 6896 - DNA, 411 bp, Triticum aestivum
  Clone ID: uC-tsrow189007a01b1
ttgttttgcgtccgaattcccccaacaacaggggggtttattaacaagaatggccgtaacagcaatccccgcaacaacaattccaccaacaacaattacctgatcaacaattgtcccaacaacaatttccccatcaacaattcccccaacatcaacagtgtccccaacaacaacaattaacgcatcaacaattcccccggccacaacaataccctgaacaacaacaattcccccaacaacaattcccccagcaaccaccacaacaattcccccaacaacaatttccaataccatacccaccccagcaatcacaagaacctttcccataacaacaatatccacaacaacaaccatctgggagcaacgttataagtatcagtggcctatgaaatgaagagatgtaatactaga

SEQ ID NO: 6897 - DNA, 260 bp, Triticum aestivum
  Clone ID: uC-tsrow189007a02b1
tttgaaagaaaagaacatgttgatcttcatatatcatggcaattaaaagcatgcctcatacatcaagaattcaactaccaatactatgcaaacctagactcttgctcaggtttacatttacctcacaactcccaggagaaaatgaaaaaaaaggaacgaaaattaaaactagatcgatcccttttatggcagcgtttcttccatccaaagaaaaaaacttggagaaagaaacataaaataaaatgaaataaaaatgaacc

SEQ ID NO: 6898 - DNA, 112 bp, Triticum aestivum
  Clone ID: uC-tsrow189007a04b1
cgcgtccgcccacgcgtgcgactagttctgtatgcccctgtcgcgtgtgttcgaccagtactgtccttcctcgtgcctccacttctaatgaatatatggcgcctcaactttg

SEQ ID NO: 6899 - DNA, 299 bp, Triticum aestivum
  Clone ID: uC-tsrow189007a05b1
ttagttcctcctcctagcaagctatatacctacataggacagccatggcccccaccgtgatggcctcgtcggccacctccgtcggtcctttccaggggctcaagtccaccgccggcctccccgtcagccgtcgctccaacggcgctagcctcggcagcgtcagcaacggtggaaggatcaggtgcatgcaggtgtggcccatcgagggcatcaagaagttcgagaccctgtcctacctgccaccgctcagcacggaggccctcctcaagcaggtcgactacctgatccgctccaaatgg

SEQ ID NO: 6900 - DNA, 326 bp, Triticum aestivum
  Clone ID: uC-tsrow189007a07b1
ttctacagctaccaccagtcccggtcacagcaggcggcatggccagcaagtcggcgtccctgctgatcctcgcggcgctggtggccgcggcgtgcctcacggagctgggctcggcggcgcgcggcgtgccggcggagaagcccgcggaggacgatgtgaagcggccggacacgttccaggaggggacggtgctgatcccggggatcgggcggtacgagctgggcacccactacatccccgacatcggcgggctggaccacagcatcccggccgccgccagtggacagttcatccccggcgccgacgacacctgggtgcccaacccc

SEQ ID NO: 6901 - DNA, 381 bp, Triticum aestivum
  Clone ID: uC-tsrow189007a08b1
ttctggctaggcgaagcggttgagtgccgcacccgagatggctaaagtccagtagccgaaagcatcactagcttacgctctgatccccaatcaatccatcgatcaacccatccggccagcgatgaacaatatatagcctcaatctgtatgacatcatatatatgtatcaacgcatacgcaccgcatgcatatataatgcattcacgcgcaatcaagcatactgcatagacattccaccccggcccggcccctctcaggtatgaatgaataatatcagttgtactactacgtttcactcgacccgttccactagacgcacgcgagcttgtatgctcaagtgatgactagtgaatatacacagcttgctattatgtgctttac

SEQ ID NO: 6902 - DNA, 335 bp, Triticum aestivum
  Clone ID: uC-tsrow189007a12b1
tgtttcttgccgagaagcactaccatgatctcaaggagaggcctttcttcaatggactgtgcgacttcctcagctccggtcccgtgcttgccatggtatgggaaggagagggcgctatcaagcccgggaggaagctgatcggtgccactgacccatcaaaatctgagccaggaaccatcatgggtgaccttgctgttgtcgctggaaggaacatcatccacggcagcgatggccctgagacagccaaggactagatcgcgctctggtctccagcccaaggagctggtctcttacaccagcaacgaggagaagtggatctacggtgtgaactaacc

SEQ ID NO: 6903 - DNA, 394 bp, Triticum aestivum
  Clone ID: uC-tsrow189007b01b1
tgttggcccggggctgctgcaccggcatccagaacctgctggccgaggccaacaacagccccgaccgccgcaccatctgcggctgcctcaagaacgtcgccaacggcgcctccggcgggccctacatcacccgcgccgccgcgctcccctccaagtgcaacgtcgccctcccctacaagatcagccccagcgtcgactgcaactcgatccactgaacgaacctgtcgacgtacgtctgccgtgtgaggagtcccatgtccggagaataaattgctgctactactagtactgaagcttagctaggccttggcggccagatccgtgtcgttctacctagtcgtgtggtgtgtggttttagggtcgatggatctgtgtgtgcacgcagtccatggtg

SEQ ID NO: 6904 - DNA, 504 bp, Triticum aestivum
  unsure (1)..(504): unsure at all n locations
  Clone ID: uC-tsrow189007b02b1
cctcacgcgttcgcccacgcgtccgcccacgcgtccgcggacgcgtggggtcattcagggccccaagcccggcaagcccaccgacctctcccgtatgcgccaggtcctagtgaagctgaagcatgctcctccaccgcacatgatgcaacctccaccagcccctgctgccaaggaaggcgccaaggaaggtgcgaaagacggcgcaccagcaccaacaaatggagccaagcagcccgtggagagcaaagaagcacccgccaacggccccgccgcagagacggagaaggagcagactgcagcatcagagtagcttcttttatttttacagaaacaccagaaccttgactatgcttagaaggaaacttttattttcaaaaatacccggagtgtcgcctaccctgtagcggtcttttttgtagagatccgcatcaggatggctatgtatcgatcagttctgaacattcagcttagtatcacagcanacaactgcactctttactggtt

SEQ ID NO: 6905 - DNA, 185 bp, Triticum aestivum
  Clone ID: uC-tsrow189007b04b1
ttgcttgttcttcttcttgttgttgtctcaccgcagcatggagcagccagcatcgagggagcaacaatggcgatggcgtcgtcgagcgggctgaggagctgcagcgccgtgggcgtgccgagcctgctggcgccttcgtccaggtccggccgctccgggctgtcgttctgcgcctacgccaccac

SEQ ID NO: 6906 - DNA, 279 bp, Triticum aestivum
  Clone ID: uC-tsrow189007b06b1
ttgtgttctctcgggactcctcaagcgcgcgaagctgttctccaaagccaaatccctacattcgtaggagccctcctacagaaataaaagctttggcgtccctgctagtgttggtctgacatcaagtcctgtcaagttttaatcccactttgtttagcaatggggaatacttttgtgttggccttgtggtgtttagcgatttgaattacctcttgcatgccctgtatattgaactcctctgtggtccatatgtcagccagtgtgaaatgaaacatcatg

SEQ ID NO: 6907 - DNA, 457 bp, Triticum aestivum
  Clone ID: uC-tsrow189007b08b1
tttgcttctatggcaatcgcttatgagaagaaatggccattgtaccttagcacaaaaaacacaatccttaagaaatatgatggcaggttcaaggacattttccaggagatctatgaagctggctggaaatccaaatatgaggctgctggaatatggtatgaacatcgtctcattgatgacatggttgcctatgcacttaagagcgaaggaggctatgtttgggcttgcaagaactatgacggagatgtgcagagtgatttcttagctcaaggttttggttctttgggcttgatgacgtcagtattgatgtgccctgatggtaaaaccatcgaagctgaagctgcccatggcacagttacccgccatttccgtgttcaccagaaaggtggtgaaaccagcacaaacagcattgcttcaatctttgcttggacaagaggacttgcacacagggcaaagc

SEQ ID NO: 6908 - DNA, 500 bp, Triticum aestivum
  Clone ID: uC-tsrow189007b09b1
ttgagaaaagtaagcgccgcgcaccgcaatcggaacggaaatcccccgaatccgtcgccggaatccatccatcgagcgatccatccggccggacggcgaggcgggagcaggaggggagcggcggagatggtgagcgccttcttcctcttctgcgggtgcgtggagcaggccaacgtggcggtggtcgagaagtggggccgcttcctccgcctcgccgagccgggcctccacttcttcaaccccttcgccggcgagctcgtcgccgggaccctctccacccgcgtccagtcgctcgacgtcaaggtcgagaccaagaccaaggataatgtgtttgttcagctgatctgtacaattcaataccgggttgttaaggagaatgcagacgatgcattctacgagttgcagaatccccaacagcaaattcagtcctacgtctttgatgtggttcgagccatagttccaagaatggagctggacagtctctttgagcaaaagaatga

SEQ ID NO: 6909 - DNA, 421 bp, Triticum aestivum
  Clone ID: uC-tsrow189007b10b1
ttgagaaaagtaagcgccgcgcaccgcaatcggaacggaaatcccccgaatccgtcgccggaatccatccatcgagcgatccatccggccggacggcgaggcgggagcaggaggggagcggcggagatggtgagcgccttcttcctcttctgcgggtgcgtggagcaggccaacgtggcggtggtcgagaagtggggccgcttcctccgcctcgccgagccgggcctccacttcttcaaccccttcgccggcgagctcgtcgccgggaccctctccacccgcgtccagtcgctcgacgtcaaggtcgagaccaagaccaaggataatgtgtttgttcagctgatctgtacaattcaataccgggttgttaaggagaatgcagacgatgcattctacgagttgcagaatccccaacagcaaa

SEQ ID NO: 6910 - DNA, 419 bp, Triticum aestivum
  Clone ID: uC-tsrow189007b11b1
ttagcacaccagcctcctcagtcctcacagcatcctctcagtccttagcttccttccctcgccgccacccaccaaggaaaggaggatgtcttgctgcggcggcaactgcgggtgcggcgccggctgcaagtgcggcaacggctgcggcgggtgcaagatgttccccgacgtggaggccaccgccggcgccgtcgccatggtcatgcccaccgcctcccacaaggggagctccggcgggttcgagacggccggggagaccggcggctgcgactgcaccacctgcaagtgcggcaccgcgtgcggctgctcctgctgcagctgcaactgagccggcgcccatgaggccggccggcagaggcgagcacgaggatgaggaggacatgcaagcaagcaccatcaccaccagttcaccaccaccc

SEQ ID NO: 6911 - DNA, 300 bp, Triticum aestivum
  Clone ID: uC-tsrow189007b12b1
tcccacgcgttcgcggacgcgtgggcggaggcgtgtgcagcgccactcacacatactacactcatccactcaagcaaaagctagcggcgttgcagctcacttgagtccagggggcatggcggctccgaggggtgcggcactggtgctggcgatggtgctcgcggccatggtggtggcgccgccggcgactgtgcacgccatatcctgctccacggtgtacaggacgctgatgccgtgcctgcagtacgtgcagcaaggcgggtcgtcggcccggggctgctgtaccggcatccagaacct

SEQ ID NO: 6912 - DNA, 374 bp, Triticum aestivum
  Clone ID: uC-tsrow189007c01b1
tttttacgcgtccgagcttgctgacacctacgggagccaggctgctctgggtgatgctaaccaggatgcgatgaagactggtaccttctacggttagaacattctccatacacacccaccatctcttgctgcataggaggaggtaaaggggcacagcaaggtactttgcctgtaccggcaggatgcaccgaccagactgccaagaacttcgacccaacggcgaggagtgacgacggcagctgcctttacaccttttaagcatgccaatttaatatctgatgttttatcctttgtacctaagtaccgcatcgcatccaagcgattgctgggcatgttttgttaatatataaagatattgagtatacctatttggt

SEQ ID NO: 6913 - DNA, 476 bp, Triticum aestivum
  Clone ID: uC-tsrow189007c02b1
ttgtcaccgctcagcacggaggccctcctcaagcaggtggactacctgatccgctccaagtgggtgccttgccttgagttcagcaaggtcgggttcatcttccgtgagcacaatgcgtctcccgggtactacgacggccgctactggacaatgtggaagctgcctatgttcgggtgcaccgacgccacacaggtgatcaacgaggtggaggaggtcaagaaggagtaccctgacgcgtacgtccgcatcatcggattcgacaacatgcgccaggtgcagtgcgtcagcttcattgccttcaagccaccgggctgcgaggagtccggcaaggcctaaacagctcactcaccacgggccacatataaagtgccattgcagttttgtcaactctgacattgctttgggttttccttctccatttgtctttcttacttgttcctaagaatatgtgtatgtccatgttcatgtaacaacat

SEQ ID NO: 6914 - DNA, 361 bp, Triticum aestivum
  Clone ID: uC-tsrow189007c03b1
cccttttgtttttttgctttatttcttaattctttttgcttttataccttctcttctttatctttagttttatctacttatcaatagtatctaccggctcgaactcgaatttgatcgccttccatacttcacaagctgcggctagttcaggactccatttgcaagctgctcggataatttcattaccttcgcgagcaagatcgcgcccttcgttacgagcttgtacacaggcttctaaagccactcgattagctgctgcaccaggtgcatttccccaaggatgtcctaaagttcctccaccaaattgtaatacagaatcgtccccaaagatttcggtcagagctggcatatgccaaacatg

SEQ ID NO: 6915 - DNA, 396 bp, Triticum aestivum
  Clone ID: uC-tsrow189007c04b1
tttgtttacctgatccgctccaagtgggtgccttgcctcgagttcagcaaggttgggttcatcttccgtgagcacaacgcatctcctgggtactacgatggccggtattggacaatgtggaagctgcctatgttcgggtgcactgacgccacacaggtgatcaacgaggtggaggaggtcaagaaggagtaccctgacgcgtatgtccgcatcatcggattcgacaacatgcgtcaggtgcagtgcgtcagcttcatcgccttcaagccaccgggctgcgaggagtccggcaaggcctaaacagttcactcacgacaggccatatataaagtgccattgcagttttgtcaactctgacattgctttgggttttccttctccatttatctttcttat

SEQ ID NO: 6916 - DNA, 453 bp, Triticum aestivum
  Clone ID: uC-tsrow189007c06b1
ttgcctgttcatggggctcaacaacaacctcggactggtcaacagcgggataccatacaatttcaccggcgagtcatggaataacagcagtgtgcaccagagcggcggcgctggctcggcgcaggtctcgatcgctgccgccgccgcggctcaccactcggcattcccatcgttactctccttggctccaaggtcgcatcagctggtttactactcgtccgaggccgatcagttcccagttgatgacctgggctcccaaagcttatccttgagctcggcgagagctttccatgaccagacaggaagctagctgccacctagctagctagtacaacgctggatcgatcgatatcctgaagaagatggagctgatcgatcggtggtatggattgcaacttttatcctcaaggtaggacttaataatgctctcccaaagcgcaaaatagctagcta

SEQ ID NO: 6917 - DNA, 211 bp, Triticum aestivum
  Clone ID: uC-tsrow189007c08b1
tctcacacaccacgcctgcctcatctctcggagcaggatgaggaggagcttgcaggaacaatggcggcccagggtcttctctctgggaggcagctgctggggaggcctctgcagtcttccatctccaggtcgtcttcctcccggaagtcccccttcgtcgtcagggcatcttccagcccccctgccaagcaaaatgacaacaggcagctgt

SEQ ID NO: 6918 - DNA, 412 bp, Triticum aestivum
  Clone ID: uC-tsrow189007c11b1
gatcccatcgtggccggcctagcactggcatccctccaccgtcgccctcgcacatcaagccaccgcagatccatccatttgccgccgccctcgcacatggagccgcctccgatccctgcgctacctcgacgggagccatcgatcgtctcactacaacttgaagctgcaacttgggcggtgccatggctccttgtgcagagaaatcaagagggggcgaggtcagggaggagctgcgggaggagtgaaggaaaagaaggcgacggagaaggctctgctcgccggagagctcgatcggcagcgacgaactccgagccgcatgttctggcgacggagggctggaaccggtccatggggagacctgtaggcgcgcggcggcggcggtttgggacggcggagaagctgcaactcggac

SEQ ID NO: 6919 - DNA, 92 bp, Triticum aestivum
  Clone ID: uC-tsrow189007c12b1
ttgtaaacttagaacatatttgcatttgatgcctggtgtgaagcctaatgtggcgtaggtaaccgccgattttcacaaaagaagacttattt

SEQ ID NO: 6920 - DNA, 361 bp, Triticum aestivum
  Clone ID: uC-tsrow189007d01b1
ttatctttgtttctgctccacatgatggcaggggttaatccacatttttagatcttcatttatatagtaaaaatagcatacacttttacaatccatatttcttgccatcatgatgtagatgcaaaattgccatgaactttttctttttcgccattgcataaaaaaaatctttttttaccatggcaatgtttttgcttataaagatgattgcatatttagtagaatgttttcatttttttatctagcacgacaaatttatttttagatcttttcaatttcttttcagagtatggcaaaatatggcctttttattcacaaccaaaagcggcctttcttagtcacagtaggtcttaggaaaact

SEQ ID NO: 6921 - DNA, 310 bp, Triticum aestivum
  Clone ID: uC-tsrow189007d03b1
tttgtttccagagccacgccgtgctggcgctccaggaggccgccgaggcgtacctcgtcgggctcttcgaggacaccaacctctgcgccatccacgccaagcgcgtcaccatcatgcccaaggacatccagctcgcccgccgcatccgcggggagcgcgcatagattgcccaaggaaaagcaatgtagagctgtccgttcgtcgcctctggtttcagatcgtgttagcaataggcaagaggcgacttttattttgttgtagaaaaaactctggttggctacattgttacaatgactcgtttcttatttcg

SEQ ID NO: 6922 - DNA, 367 bp, Triticum aestivum
  Clone ID: uC-tsrow189007d05b1
gctcttggatcagatcaaatattgcagtggtggtccttcggctgcatcatgggaaagtgcactaagcaagttcacgcgctgttgctacttcttctcgtatgcttcactattcatgggcagtttgaagccatcggtgtcaatggcgagcgtattcctccgtggtgcacaaagagtgcaactataccaatctgcaacccagataaatatagatgctattgttgtgttcaaaattggcaatgctacaaaacaatggatgagtgcagagccaagtgtgcatatttacctccctcctcttcctctgtacttccatgaaaccgggttcttctcatgagctagaagaaaaatgaatagatccagacaataaaaa

SEQ ID NO: 6923 - DNA, 420 bp, Triticum aestivum
  Clone ID: uC-tsrow189007d07b1
ttctgggcattaccgccggagcgacgacggaggcggccatggcggagcggggggtggagtcggtcctgttccgggggaagaagctgatgccgcaaaccaacgacaagcggctggaccgcgtggtggagcaactattgttcggtgctgctattttccattcggttgtggggtggttctacttttcaccaatctggccaaggaccaaaagtaggtttgacctcaatttcgatgcaaacatggattgggatgtgatgcatgtacttgcttattaagggatttggatcttgccctcaattagagttcccaatctcaacgaagtggggtttatgaattttattattccttagcttgaatggactgtagcttcgcttaattgactgacagttgtatttgactgcataactggattaattgatttca

SEQ ID NO: 6924 - DNA, 57 bp, Triticum aestivum
  Clone ID: uC-tsrow189007d08b1
ttcttgctcgaggtgctgctagtactttgttatctatctatctatctctattataat

SEQ ID NO: 6925 - DNA, 390 bp, Triticum aestivum
  Clone ID: uC-tsrow189007d11b1
aggttccaggacgggtgggcggacccgacggtcgatcagctgccgccgacccccaccaaggacaagctcatggacaggtactggtcgcacgtcgcgcagtgcaggagctgcagcgccgccctcaaggccatgagggcgctcgaggtggcactgcaggtggcgtccatcgccgtcgtcgggctcctcgcggtggccaaggggacgctgctcacctcggtcgcccagcgggccgtcgtcgtgtccgtcgccgtcctgtgcttcgcggcgtcccgctggctcgccgacttcatccagaagaacttttattttgaggattatgtccatgcttacaagtgacttggcaaatcatccagtagggaaaaatatgtctagagatatagtagaaaatgc

SEQ ID NO: 6926 - DNA, 378 bp, Triticum aestivum
  Clone ID: uC-tsrow189007e01b1
ttgttgcagcaggaattatgttttcatgggcgcagaaatacataactggattgttcataccaggtgatcagatcctgttctggatgctgaacatggtgtcagtaatcgggctctcattgacgttcaagccatttttctctatgccgagtgcgctgaaatgatgagcacacaattatgttcatctagctagttaagtaaagttagggacacaccacagtttgcagccctggataaaaaaaactggtcgtgtgttgtgtcacatatatttttcatattttttttgttgtgtgatcagatgtggcaagtatcttcttttttttgtcaaaactcctacgcacaaggtgctttggtttatgactcgttcctggtaagaagacc

SEQ ID NO: 6927 - DNA, 369 bp, Triticum aestivum
  Clone ID: uC-tsrow189007e02b1
tctctgactccgactcggatggctccgaggcgacgacagcgctcgttcccgcccagcaccctcaccggcaccttcggtcgggccacagcgcgcgcgatatcttttgcgccacacccacacatgctgtgtttaactcgggcggggcgccgaggcggcaggtccgccagttgcgggacggccccgcccacgggatgatgccggccagaagcggttcgaccaagttcaccggggcaaagcagcggtgcaggactgtcgagcgccgggtgggcctgcagaagcgcgacagggcgtggtcgacgagtggtgccgggacatcggcgtcagcaagggcgtcttcaaggtctggatgcacaacaacaagcacaacta

SEQ ID NO: 6928 - DNA, 273 bp, Triticum aestivum
  Clone ID: uC-tsrow189007e04b1
tcttcacgcgtccgcctcggtgagttgcacaaggcgtttgagctgctgggtgccttctgcctcgtcgacctctttccgtcgtccaggttggtcaggtggctgaccaacgacgagcgccgcatgaaaagaagctacggccgcacccagcgtatcatcaccaaagccatcgagggacgcaaggccaccagagctgccggcgtcggcgcttcagacacgtacgacgaggacctcctagacgtgctgctcaggctgcagctggaggactcgttagag

SEQ ID NO: 6929 - DNA, 289 bp, Triticum aestivum
  Clone ID: uC-tsrow189007e05b1
ttttaatcgaatcctccagtccaaatcaaaacaagggagcgagcatggcgtcgtcctctgctgtgagcaagcgcggcgacgcgggcggcgtcctggctgccatctcgcggtcctcggtggcggcgcacggccgcgaggcggcggcggtggcggggaagctgctgcggagcacggggaaggcggcgtggatcgccgggacgaccttccttgtgctggtcgcgccgctcatcatcgagatggaccgggagcagcagatggtcgacctcgacctccagcagcaggctcttct

SEQ ID NO: 6930 - DNA, 393 bp, Triticum aestivum
  Clone ID: uC-tsrow189007e06b1
ttttctttcctcccccgtcgtcgcggctccagctgggggtttctagcccccgccctcccgcctcaccgtcggccccgtacgccatgtcgaagcaaggagggaaggccaagccgctcaagcaggccaaggtcgccgagaaggactacgacgagaatgacctggcatacctccagaagaagaaggatgagcaaaaggccctgaaggagctgaaggccaaggcaggccagaagggtgcgctgggaggatctggtctcaagaagagtgggaagaaatgagtctgcccacccttacgtaatgcccagaaaatgataatctatctatctacctatctgtgtcgcgcttcactatctgtggttgtaaaagactaccttcagttgtgttgagcattaagca

SEQ ID NO: 6931 - DNA, 459 bp, Triticum aestivum
  Clone ID: uC-tsrow189007e08b1
ttctgacggaggagagcaaagctcttcttcccaagtaagtaagatagtgatcagggagggagggagggcatgccatgtgcttggccttccaagttaaaggagctagctctttagaccaggtgggcgagcgggaaggaccggggcgtctcccacgacgcagacgagaccggcggcggcttatggtggcgcggtcgatgaggacctgctggatctcgccggatctggtgggatggcgcgcagatctctctccgatcctttcccagatcttctcctgctacctagggttccccaccgcaggcgcacctcggcagccatcgaggcgaccactgccgcctgcaggcggaacgaggcggaggagaacctcctggtacgacgtgaggaggagacgtacggatgaacttaaagatcaggagagacatactggccgggacaatctttaaaccatgaagctacacaatc

SEQ ID NO: 6932 - DNA, 427 bp, Triticum aestivum
  Clone ID: uC-tsrow189007e09b1
tttttagcgaaggttgccgtcgcgccacacagggaaatttttaccgcttagacgagtgctcctggacttgttcaaccgtcgtgtgctagcaggaaacggttcctctccaccagcatccatgctggacatcaagtacttactggtatagtagcaacataattggtgtgggatatggcaatacgctttgcgcgattgatatgatggtatgataagatttgttggattgagattcctggaatggataaaccagagaaagttgtgtggctaccgtagtattggcactggggcacgcgtagtcatttcgggtgtatttagttgggcactgctaggcgccggccgttcggcccgagccttgcgccggtcgcctcctagctgtaccatgcacccagccgtaagtagtaaccgttgtatgtgtctttcatctcgc

SEQ ID NO: 6933 - DNA, 298 bp, Triticum aestivum
  Clone ID: uC-tsrow189007e10b1
aggttgccgtcgcgccacacagtggagttcttaccgctgagacgagcgctcctggactcgatcaaccgtactgtgctagcatgctacgggtcctctccaccagcatccatgctggacatcaagtacttactggtatagtagcaacataattggtgtgggatatggcaatacgctttgcgcgattgatatgatggtatgataagacttgttggatcgagattcctggaatggataaaccagagaaagttgtgtggctaccgtagtattggcactggggcacgcgtagtcatttcgggtg

SEQ ID NO: 6934 - DNA, 301 bp, Triticum aestivum
  Clone ID: uC-tsrow189007e11b1
tgtttctcccctgctctcctccacccctcccatggccgcccccagttcctgggcctccccgttccacgaaaagagagcttagcgctaccaagctctccgtcctttcgagttctcggctgctttctccgtcccggtcatcaatcttcgtcgagcagagagagagagacggaggtggtcagatttgcgcgagatccatggggaagtacgtggagctgctggacatgggggtgcgcatcgtcgcgcggttccactcccactgcccgcagacagcccggatgtactaccaccctcccgcctcctc

SEQ ID NO: 6935 - DNA, 288 bp, Triticum aestivum
  Clone ID: uC-tsrow189007e12b1
ttcttggcagtctggctctctccatcccaatccggacctaccgcccgctctcgcacgccatggacgccacggccaccggcgccaaggggaagaagggcgcggccgggcgcaaggccggcggccccaggaagaagtcggtgacgcggtccgtgaaggcggggctccagttccccgtcggccgcatcgggcggtacctcaagaagggccgctacgcccagcgcgtcgggaccggcgcccccgtctacctcgccgccgtcctcgagtacctcgccgccgagctgctggagc

SEQ ID NO: 6936 - DNA, 81 bp, Triticum aestivum
  Clone ID: uC-tsrow189007f01b1
tgtagcatgcaggtgtggcccatcgagggcagtaagaagttcgagaccctgtcctacctgccaccgctcagcacggaggcc

SEQ ID NO: 6937 - DNA, 447 bp, Triticum aestivum
  Clone ID: uC-tsrow189007f02b1
ttgtgcacactagcacagaatggccaacgcagggttgctccctgcgctcatctccttcctcatcctgcccttctcttccctggccctgacccaggacttctgcgtggccgacctagcctgccccgacacaccggcggggtacccgtgcaagccgggcgtcggcgcgggcgacttctactaccacggcctcgccgccgccggtaacaccaacaacctcatcaaggcggccgtcacaccggccttcgtgggccagttccccggcgtcaacgggctcggcatctccgcagccaggctcgacatcgccgtgggcggcgtcgtgccgctgcacacccacccggccgcctccgagctgctcttcgtcaccgagggcaccatcctcgccggcttcatcagctcctcttccaacaccgtctacaccaagacgctctacatgggcgacatcatggt

SEQ ID NO: 6938 - DNA, 432 bp, Triticum aestivum
  Clone ID: uC-tsrow189007f03b1
tcttttctctctctcacctccggcgaataacacaccagagctcacctctcccctcgcttccccgcgaaaatgtcgactgacgtggctgccgctgacatcccggtgcctcaggtggaggtagccgccgacgctgccgttgacacaccggcggcgaagccggccaaggcgcccaaggcggccaaggccaagaagtccactggcccgaagaagccccgcgtcaccccggcccacccgtcctacgccgagatggtgtcggaggcgatcgccgccctgaaggagaggagcgggtcgagcaccatcgcgatcggcaagttcatcgaggacaagcacaaggcgcacctcccggccaacttccgcaagatcctgctgacccagatcaagaagctcgtcgccgccggcaagctgaccaaggtcaagggctcctacaagctc

SEQ ID NO: 6939 - DNA, 352 bp, Triticum aestivum
  Clone ID: uC-tsrow189007f04b1
ttgtttgtagcccgcgcgctctcgccagcgccgggggcgcctttccccgcccccttcgtcgcgccgcgtgcggccggccaggtgcgcggggttcgtgggcccggcggtggagtcggcgtccccgggcgcgagggcggcgacgctcgcgagcagccgcggcgggaccgactcgtcactggccatctgccgggtgctcaacggcatgtggcagaccagcggcgggtggggccgcatcgaccgcgccgacgccgtcgacgccatgctcgcctacgccgacgccggcctctccaccttcgacatggccgaccactatggaccggcggaggatttatacggcatgttcatcaacaaa

SEQ ID NO: 6940 - DNA, 269 bp, Triticum aestivum
  Clone ID: uC-tsrow189007f05b1
ttaattggcgaagggggatactctggaatttgaaatgttctacagatctctctcaacccagctcaaggacgtagtttggaagtgcggcggcgaggtagaagataacagcaccgtggcatgaagcacaattttccatgtacatagtccctagttcatatgtgggatggatggtgggtgttggctgcggattgggttgtgcagaccgagttctttcgttcgtttgttgatgatgatgacgatgaataggctccgatgaaacagcgggcgca

SEQ ID NO: 6941 - DNA, 239 bp, Triticum aestivum
  Clone ID: uC-tsrow189007f06b1
tgttggttagagattaatcatgtgttccgtaagtgttagtttgtagtttctactactattttctcgcggttgatgagagagactgggaagtgaatttgtataccggaagatttttgtcagccgtgcaactcgttgcgcctcttgatagaaaaagtagaaattttgtcaaagtcattcttatatgcttagcagcagagatgatgtacgataccattaaaaacccatctgaatgtttgttg

SEQ ID NO: 6942 - DNA, 425 bp, Triticum aestivum
  Clone ID: uC-tsrow189007f07b1
tttttgcaccctgttcttcttacagaggctcctcttaaccctaaggccaacagggagaagatgacacagatcatgtttgagacattcagtgttcctgccatgtatgtcgctattcaagcagtcctttctctatatgctagtgggcgtaccactggtattgtcttggattccggagatggtgtcagtcacacagtcccaatctatgaaggttatgcccttccacacgctatcctacgtcttgatcttgctggtagggatctcactgattccctcatgaagatcctcactgagaggggttactctttcacaaccactgccgagcgggaaattgtccgtgacatcaaggagaagcttgcatatgttgccctcgactacgaacaggagcttgagaccgcgaagagtagctcatcagttgagaagagcta

SEQ ID NO: 6943 - DNA, 484 bp, Triticum aestivum
  Clone ID: uC-tsrow189007f08b1
ttcttcctccttctcctcgggtttgcacagtcgtccaccatgccgaagcagatccacgagatcaaggacttcctgctgacggcgcgccggaaggacgcgcggtcggtgcggatcaagaggaccaaggacgccgtcaagttcaaggtgcgctgctccaggtacctctacacgctctgcgtcttcgacgccgacaaggccaacaagctcaagcagtccctcccaccaggtttgagcgtccaggaggtttaagcatcaagccagacaatgccttttctagtagcgggaatgttctatccatcttgctttagtaactgttagcaggctctccttgtttacccccattaagagagttttgatgtcccaagaatggaatgtaatgttgggagctatgtggttgaacctgtgaggatttttgtgttattttcacttttgctggagaggagatcaattatcttatcctaaattggtttagtatctcactatt

SEQ ID NO: 6944 - DNA, 410 bp, Triticum aestivum
  Clone ID: uC-tsrow189007f09b1
ttcttgcgccgccagctctaaaggaggcggcgtcggccggcgggcgagcgcacgcccaggcccaatcgatcgatcccagctctagaggggagggagcaaccatggcgggggacggggaggacgaggtgccggcgatgggcggagacaagctgatcctgcgggggctgcagttccacggcttccacggcgtgaagcaggaggagaagaagctgggccagaagttcgtggtcgacgtggacgcctggatggacctcgccgccgccggggactccgacgacatcgcccacaccgtcagctacaccgacatctacaggatagccaagggcgtggtggaaggcccgtcgcggaacctcctggagtcggtggcgcagtcgatcgccggcaccacgctgctcgagtttccccagatc

SEQ ID NO: 6945 - DNA, 369 bp, Triticum aestivum
  Clone ID: uC-tsrow189007f10b1
ttcttgcgccgccagctctaaaggaggcggcgtcggccggcgggcgagcgcacgcccaggcccaatcgatcgatcccagctctagaggggagggagcaaccatggcgggggacggggaggacgaggtgccggcgatgggcggagacaagctgatcctgcgggggctgcagttccacggcttccacggcgtgaagcaggaggagaagaagctgggccagaagttcgtggtcgacgtggacgcctggatggacctcgccgccgccggggactccgacgacatcgcccacaccgtcagctacaccgacatctacaggatagccaagggcgtggtggaaggcccgtcgcggaacctcctggagtcggtggcgc

SEQ ID NO: 6946 - DNA, 422 bp, Triticum aestivum
  Clone ID: uC-tsrow189007f11b1
ttcttttcgcgccgccgcccccgtcgttggagcagaagccgtttgcgccgccgcctccgtcgtcgtagcagaagcagggatccccatcaccaacagcccaagaaattaagcatggatacgcaggtgaagctcgcagtggtggtcaaggtgatgggccgcaccgggtccaggggtcaggtgacccaggtgagagtcaagttcctggatgaccagaaccgtctcatcatgaggaacgtcaaggggcctgtccgggagggcgacatcctcaccctgcttgagtctgagcgggaggccaggaggctgcgctaagcactttcttttcacctgactgtcttcggaattgctcatgaaatgatgtgctgttgccttcttactctaccgctttcatcttttgtcttggctatggagatgtaatgagtttc

SEQ ID NO: 6947 - DNA, 240 bp, Triticum aestivum
  Clone ID: uC-tsrow189007f12b1
tggtgatgatgacatgggcttcagtctgttggactaagttgtggggcaccttgtgtctgaagtatctatccttggccaggaaactagagtcaatgatgttttagcctttatttagctgagttgtgaaacactggcaagacaatgttttgatatgtaattcagcccctggttgctggttgatttactggtgaaccatacctttgctatccaattttggtcctttaacaatgcgttgttttg

SEQ ID NO: 6948 - DNA, 67 bp, Triticum aestivum
  Clone ID: uC-tsrow189007g03b1
tcgggaaagggcgggggtcctcactcgatcggatgcttgtgcgggggtcccaatgaagctcgggtgg

SEQ ID NO: 6949 - DNA, 446 bp, Triticum aestivum
  unsure (1)..(446): unsure at all n locations
  Clone ID: uC-tsrow189007g05b1
tcccacgcgtccgcccacgcgtccgctcattgcctgttgccacccacccaccggctccaccctccgaatctcggacgcctcagcgccggccgcagggcacgcgagtcgagttgcttccgttccggcggcgggggaagagatggcggcgaacctagaggacgtgccgtcggtggatctcatcaccgaggtgctccgccgcgccaagtgcagctccaagcccgacaagcgcatcatcctcgtcggtccacctggctctggaaagggtacgcagtcgccccttattaaggatgaatactgcttgtgccatttagccactggtgatatgctgagagctgctgttgctgctaagactcctctggggatcaaggctaaggaagctatgaacaagggagagcttgtttcagatgactnggttgttgggattatcgatgaagccatgaagaaac

SEQ ID NO: 6950 - DNA, 376 bp, Triticum aestivum
  Clone ID: uC-tsrow189007g06b1
ttgctccgcacgcggtcaaccgtgggaacaacacatgcggatccaaatctcccagcctcccacagctccgtcgccgctcgtcccgatcgatcgaccttgcgatcgactccgtttgttgccgcgcgtgcgcgcacagcagcacatccatggccgtcgccgccggaggaggagtggcgctgagtctgcgcggcccgtcgtcggcctcggcgtcgccggcggtggggcggctgcgtagggtgtcgtcctcgccggctgtgaggtgcggggcgacgcgggaaaggtggccggcggcgggggccccgtacggggtgctggaggaggaccactaccggactctgaggctgcagccgggcgcctccaggggcgaggtcaagaa

SEQ ID NO: 6951 - DNA, 414 bp, Triticum aestivum
  Clone ID: uC-tsrow189007g08b1
tggaaaatgtggagatctgtcaatgaactgatgcttgttcggtgggacaaatcaaagtccgctggtgtgtcaaacttgatacttctcaagttcagtgaggcggatgcacatgaatccacgacgcttgatcagataaaagatgaagaacctgaattccatgccatggtttcacgtgtcctgaaacgagccgaaacggagtttgctttatgagctggtcagcaatggtattggatttctacaactgctataccgtcataacccgtgcaacgctcatggaccaggcaggtaggttactgttttgcgtcgtctgattttgtgtactagtgacaaggagcaagtagatgatgcacaatttcctgaagtttgttttggccatagaagtcggacttgctggtactgtttcgatttctctgg

SEQ ID NO: 6952 - DNA, 437 bp, Triticum aestivum
  Clone ID: uC-tsrow189007g09b1
ttcttggaaaggccgggagttctcactcgattgcatttgtgagcaaggctgccaaagaagctggtgttgcatcagagtacaaactagcaaagagggtggaagctgttgttggcgtccgccatttatcgaagctggacatgaagctcaacgacgcgcttccgaaaatcaaggtcgaccccgagacctacacggttactgctgatggagaggtcctgacttgccagccagcagccacggtgccattatctcggaactactttcttttctaggccacccattgcttgagaaattcttggaaggtcaataattcactcaactagcttcgacggtaacttcaagttgcgcatgggagatgtgctgctggctcaaaataaacaattatacatttacatgaaaaaaaatcacacgtatacatattgcaatacttcagtttcttg

SEQ ID NO: 6953 - DNA, 437 bp, Triticum aestivum
  Clone ID: uC-tsrow189007g10b1
ttcttttaaaggccgggagttctcactcgattgcatttgtgagcaaggctgccaaagaagctggtgttgcatcagagtacaaactagcaaagagggtggaagctgttgttggcgtccgccatttatcgaagctggacatgaagctcaacgacgcgcttgcgaaaatcaaggtcgaccccgagacctacacggttactgctgatggagaggtcctgacttgccagccagcagccacggtgccattatctcggaactactttcttttctaggccacccattgcttgagaaattcttggaaggtcaataattcactcaactagcttcgacggtaacttcaagttgcgcatgggagatgtgctgctggctcaaaataaacaattatacatttacatgaaaaaaaatcacacgtatacatattgcaatacttcagttttttg

SEQ ID NO: 6954 - DNA, 432 bp, Triticum aestivum
  Clone ID: uC-tsrow189007g11b1
ttcttcgcaaacccccgagagatcacagcatgttcggcttcggtcaccacggccaccatggccagaacccccctgccaacgctccggccgccggcggcggcaaccagcccaccttcaagatcttctgcaaggccgacgagggctcgtgccattcaacccggagtacctcgacgagtccgtgatgtggacggagagcggcgacgtcggcaagggcttccgctgcattcgcatggtgaacaacatccgcctcaactttgacgccctcaacggcgacaaggaccacggcggcgtgcacgacggcaccaccgtcgtcctctgggagtgggccaagggcgacaaccagagctggaagatcctcccctggggcgaagaggcctacgccggaggcagcgccaacgccccccgcggtggctccacagagcccaccgtgcg

SEQ ID NO: 6955 - DNA, 392 bp, Triticum aestivum
  Clone ID: uC-tsrow189007g12b1
ttcttcttgattattttcatgcatcactcaagggggaaagactggctacctgcaaaaccagcatattaccagtatgtgtgcgcaatgctggcacttaacggcctgtcgctgtttggctgtttccttgttgcatgtggagctggatttggtttatggctgtacaacctcactgctgtctgttaccatgctctttaccttccacttctgtatgtgactttcatggcagacttcttccaggaggaagatatgcttctagagaacgtatactactccgagatgaaagacgccgggttctttgatgctgactgggattaaacctgcctgcagatcccgttccacgctgtatgacttatttgtatgtgaatttgcacggagtagcttcatcctggaga

SEQ ID NO: 6956 - DNA, 340 bp, Triticum aestivum
  Clone ID: uC-tsrow189007h01b1
ttgtctagagatatgaatcacttcgccattgggagtgggttgatgaagtcattcctgacgctccgtgggtagtaacagaagagttcttgaacaagcataacatcgattttgttgcacatgattctctgccgtatcatgatgctagtggagctagtaatgatgtctatgaatttgtaaaaaagcttggtaaatttaaggagaccaagcgcacagaaggaatatcaacctcagacattataatgaggattgttaaagattataatgagtatgttatgcgcaatctggccagggggtacagcagaaatgatcttggtgtcagctatgtcaaggaaaaacgact

SEQ ID NO: 6957 - DNA, 307 bp, Triticum aestivum
  Clone ID: uC-tsrow189007h02b1
ttctttccgacttcggcggcgcggccatctggatgggggcccttaataggagaaggtcatggcacccaaggggggcgagaatgcaggtggcagcagctgcagactccaagaacattctcatcatgggaggcaccaggttcatcggcctcttcctgtccaggaaacttgtccaggagggacaccaggtgacattgttcaccagaggaaaggcacccataacccagcagttgccaggtgaatcagatgcagagtatgcagagttctcttccaaggtgctgcatttgaaaggtgataggaaagactttga

SEQ ID NO: 6958 - DNA, 392 bp, Triticum aestivum
  Clone ID: uC-tsrow189007h03b1
ttgtatattgggagtgatcaaagaggaagctgtggttgaagtcccaaaataggatgtttaggagcaagaagtcacgccggatgaggttgtgcatgaagctgcagttggcaagggtttgggtggagctttgaagtttctaaaggagcgagggaccctcaatgagggcaccaattggggaggcagaaccacggacaagaagaaaagcaagcttgttggtattgaggaagaggctcaggacggaaaaaaagaaatccgcatagaaagaatggatgaattcggtcgagtgatgacacccaaggaggcatttagggatctttcgcacaaattccatggcaagggaccaggtaaaatgaagctggaaaaacggcagaagaagtaccaggatgatatga

SEQ ID NO: 6959 - DNA, 161 bp, Triticum aestivum
  Clone ID: uC-tsrow189007h04b1
tgtttcgcgtccggagatatagtactagaccgggggatcatcgttgtttagtcaatggagtgttcaatgtaacgatgataaataaagtgatgtgtaccatcatgtgtaaccccgagctatactagttcaaacatgagaataaaagaaagaaagttcttgtc

SEQ ID NO: 6960 - DNA, 445 bp, Triticum aestivum
  Clone ID: uC-tsrow189007h05b1
tcttggtgtccgccccaaaggccccgtcgtggacgtcaaggcgtcctgcgccaagactgatggcccgatcacctgcaactccttcctcgggcccgagccggacagcaagacggcggacgcgcgcgggctggcggagatctccatgagggtcaccgccaagctcggcggcttggtgggggcctacgcgcgccgcgagctggatctggtcaacgacaacccgacgtggcagtgcctggacgagtgcgccgaggacatcgaggacgcgctgtcgcacctggacgacgccctgggcggcgtcaacgacgcccagttcgaccaggtccgccagtacatcgacctctccgagcaggacacctggtcctgcgacgagacctgccgggacacgccgcccagcccggtcaggaccgagctgctccgcaagaacctcgaattcgagaggatgatg

SEQ ID NO: 6961 - DNA, 86 bp, Triticum aestivum
  Clone ID: uC-tsrow189007h06b1
tttttaaaaaaaaaaaaaaaatagaaaaagagggggttatttaaaaaaaacaaagaataaaaaaaaaaaaaaagggggggccgttt

SEQ ID NO: 6962 - DNA, 305 bp, Triticum aestivum
  Clone ID: uC-tsrow189007h08b1
ttcttgactccactccgagccctgttctcccgggggactcgtctactcctccacctccgtgctgccgccgccccgtcgaccgccgctcgcgggagccctcctcttcctcagcctaggagccgtagcgggttgcgccctctccacccgccgtctccccttcctccgggcaataagctctgctcgaatggagtctacttccacgaccgtaccttccattgttgtgtatgtgacagttccgaatcgggaagcaggcaaaaagctatcaggaagcattatcagtgagaagcttgctgcttgtgtgaaca

SEQ ID NO: 6963 - DNA, 111 bp, Triticum aestivum
  Clone ID: uC-tsrow189007h09b1
tctctctctcaaatttctgtaaccttggggggtgttttgatcagaattgtgtattgttcagggttgtgtaatattcagacttgactagttctaatcacttgttattcgttc

SEQ ID NO: 6964 - DNA, 118 bp, Triticum aestivum
  Clone ID: uC-tsrow189007h10b1
ttttctgtctctctctcaaatttctgtaaccttggggggtgttttgatcagaattgcgttatgttcagggttgtgtaatattcagacttgactagttctaatcacttgttattcgttc

SEQ ID NO: 6965 - DNA, 436 bp, Triticum aestivum
  Clone ID: uC-tsrow189007h11b1
tttcttaaaaaagctgcctttgatggccaccaaggggcctatctgctccacccgcttcagatctccggccagcgccgtttggttcctgccggccgccgtcttcatcctcctcctcctccttctgggccgcccgaccatggacccctacgctcccgccacccctcctggtcccgtgtcttcccggcgcgccgatctgtacggcaggatggcgcgggaccttgacgagcgcggcgcggccttcttgaagggcggcgagacatcgcagtccctcacgctctcggacctcttcgaggtcagggacggcgccgtcgtgcccaggctcaaggccgtcgacccgccggtgcgtgcaaacgtgctctacctggacccggtgttcgccgccgagatagcgaaggctgtgaaggaagtatttcttccttattttgataaagctatt

SEQ ID NO: 6966 - DNA, 301 bp, Triticum aestivum
  Clone ID: uC-tsrow189007h12b1
tgtaaatcggtggtggcaagtaagcagctgggcgtggttgcctacctgcgatacttggtatctagtgcttctgggtgtttgagatacacatacataggcatcaagatatctgttgggtgaaacaagtttgatccagatttgtgtgttttttacaccgaatgctcgaggtgctgctagtactttgttatctatctatctatctctattataataccctttggaattggaactgagtggttgctggaacttagattccggtttgctcatccgccctatctctatgaatgaattggtttgggtt

SEQ ID NO: 6967 - DNA, 339 bp, Triticum aestivum
  Clone ID: uC-tsrow189009a01b1
ctttatttcgccgaccagcgcgtcctcttcctcgggatccctaacacattgaatgtgatctcaaacatccccttcctctttgtcggtctcgctgggctcatcctgtgccactacaaaaactacttcaggctatgctcacagggggagctctggagttggacactcttctatgctggtgtcactgctgtcggtgttggttcatcctactaccatctctacccgaatgatgccaccttagtttgggacagattgcctatgacgattgctttcacgtctatcgtggccattttcatcattgaaagggttgatgatagggcaggaacaaagtcccttgcaccc

SEQ ID NO: 6968 - DNA, 248 bp, Triticum aestivum
  Clone ID: uC-tsrow189009a02b1
cttatcgtgtccgcccacgcgtccgagcagaagctgcagcttcaggttcagcttgttctccatagcaatggctggcactggcagcacctggctcctgctggagcagaagggagctgggccgggagcaaggagctcccacgccatcaccctcgtcggcggcacggtctactccttcggcggagagttcaccccgcgccattccgtggacaacaccatgtacgccttcgacctcaaggcgctattctggt

SEQ ID NO: 6969 - DNA, 137 bp, Triticum aestivum
  Clone ID: uC-tsrow189009a04b1
gtcgttatcacgcccttgcacaagcgagcgagcaaccatgtcttctgcagagccgacgcgagactagagcgtctacatggccaagcttgcggagcaggccgagcgctacgaggagatggtggagttcatggagcgcg

SEQ ID NO: 6970 - DNA, 201 bp, Triticum aestivum
  Clone ID: uC-tsrow189009a05b1
gttattcgtccgctcccctcgcctcctcgtcctgccccttctaggggatcgccggagaggagatcgcgacgagggcttcctcctatcagctaaatcaaagtcatggagcacaaggagaccggctgccagtctcgtgagggccccatcctttgcgtcaataactgcggtttcttcggcagtgcggcgaccatgaacatgtgc

SEQ ID NO: 6971 - DNA, 123 bp, Triticum aestivum
  Clone ID: uC-tsrow189009a07b1
ctgacgattgttccgtcatattgtgggacctgacaggcctggtctttgtgaagcagttgcctaggttcccagcgtcagtgtctgcattacatgtgaacaacctcaatggtgagattctgactg

SEQ ID NO: 6972 - DNA, 144 bp, Triticum aestivum
  Clone ID: uC-tsrow189009a08b1
tcttatgtttgagacacatctcattctgggatggactcggaaaaaagcggtgatggccgcacaagggcttacaaatttgtcgcctactcagcggtcactttctctattgtggctgtgttgagcgtcgtttgcacactaccaatg

SEQ ID NO: 6973 - DNA, 157 bp, Triticum aestivum
  Clone ID: uC-tsrow189009a09b1
tcatgcgtccgtattgatttcctgtcgaagacaatgtaccttgaagatagaactgtgagactccaactctgggatacagctggtcaggaaagattcaggagtttaattccaagctacatcagagactctttagttgctgctattgttttcgatgttg

SEQ ID NO: 6974 - DNA, 173 bp, Triticum aestivum
  Clone ID: uC-tsrow189009a12b1
tccacgcgtccgcccacgcgtccggacagctctggctctacgacagcgagaggaatatcgccgcggggaaagctctcggcctccgcacagccctggttggcaagagggcgaggagcaaggaggcggactacgcgctggagaccatcggcggcctccggcgagccatcccggag

SEQ ID NO: 6975 - DNA, 255 bp, Triticum aestivum
  Clone ID: uC-tsrow189009b01b1
gtttggtagagcggagcatagaggatacctcgacggcgccggccatggcatccgcctacgaccgcacggccgacctccgcgcgctggacgccacctgctccggcgtccgcggcctcgtcgcctccggcgtcacgcgcctcccccgcatcttccgcgttccctacggcgtccaccgaccacaaccacctccaccgcacgccccatcccaagaagcgccgtccgtgcccgtgatcgacctcagtggcgccgaccgcg

SEQ ID NO: 6976 - DNA, 183 bp, Triticum aestivum
  Clone ID: uC-tsrow189009b02b1
cttactgtgtccgacgccatcggccaattcgaccaacagaattctggcaccgtcatcggtcgcgggttccagccaggtgggtcgcagaccaacagcaggggcggggtccgtatgaacaggttcggcgacctcagccccagggaggtcattcagcagtttaccgggctcaacaccaccagcttg

SEQ ID NO: 6977 - DNA, 225 bp, Triticum aestivum
  Clone ID: uC-tsrow189009b04b1
ttctattgttgccaactatgaatatggtttttactggcacttttatcaggatggtaagatagaagctgaagtaaaacttactggaattctgagtttgggagctctgatgcctggggaatcaaggaaatatggtacaactattgctcctagtctgtatgcacctgtccaccagcatttttttgttgcccgtatggacatggctattgattgcaaacctaacgaagc

SEQ ID NO: 6978 - DNA, 174 bp, Triticum aestivum
  Clone ID: uC-tsrow189009b05b1
ttatctcgtccgcccacgcgtccgagaaaataaaagcaaactggagagaccatctgttcctctccctaccaaccatcttccttagcgacgaggccacccagagctccacaggaaagaagcgcgaccggagaaagaaggagagcaagatgtcgtcggtgttcagcggcgatgaga

SEQ ID NO: 6979 - DNA, 133 bp, Triticum aestivum
  Clone ID: uC-tsrow189009b06b1
catgaagtctgctacccaatcccatctactaccccccatctctcttcctgctccgtggtgtacttgtggtctcgaggatgaggagctccatggccctcttggcggcggcgctgctgctgctggtgtcgctggc

SEQ ID NO: 6980 - DNA, 175 bp, Triticum aestivum
  Clone ID: uC-tsrow189009b07b1
tttcctacgcgtccggcaagagcctggcacctgagtatgagaaggcggcccaactgttgagcaagcacgacccagcgattgtccttgctaaggttgatgccaacgatgagaagaacaagccgcttgcgggcaagtacgaggtccagggcttccctacccttaagatctttaggaa

SEQ ID NO: 6981 - DNA, 84 bp, Triticum aestivum
  Clone ID: uC-tsrow189009b09b1
tccacgcgtccggttcgccccccctccgatctcaatgctctcccggggtcaaacccagcggacgctgtgagccgcggcggagag

SEQ ID NO: 6982 - DNA, 183 bp, Triticum aestivum
  Clone ID: uC-tsrow189009b10b1
tcgctcacgcgtccgggttgtccagagggagtccgagtcgatctcgaggaagaccctcaggaactcggccgagaagtttgagttccatgccgaggtgtccaggctcatggacatcatcatcaactcactctacagcaacaaggacatcttcctgagggagctcattttcaatgcatctgatgc

SEQ ID NO: 6983 - DNA, 112 bp, Triticum aestivum
  Clone ID: uC-tsrow189009b11b1
ggaaccaacaaatcctagtccaatctcgactccgatcgactacaggctgggttgattttactgccccaccgccttaagatgcacatcatgatgaagaccctcaccggcaaga

SEQ ID NO: 6984 - DNA, 118 bp, Triticum aestivum
  Clone ID: uC-tsrow189009b12b1
tccacgcgtccgagcaaccgcgtcgacgggctgggactgttcctcctactattacaggaaggccggcgccatcgccgaggacgcccagctcggcgaatcattccgttcatggcttgat

SEQ ID NO: 6985 - DNA, 170 bp, Triticum aestivum
  Clone ID: uC-tsrow189009c01b1
acgatactatggattctccggcggcggcagctagggcggcttttgtggcaaggttcggtctcctacgcatgttctccatcgccgactttgcgacgccgaacgcgcgcatgttctccatctcgggcttcgcgccgccgagcccgtccacgcctcccccgaaggccgacccc

SEQ ID NO: 6986 - DNA, 238 bp, Triticum aestivum
  Clone ID: uC-tsrow189009c02b1
cctcgtttcactccactcctctgcctgaggtaccaagagcaccagtaaaatggctctccagaacaaggaggtggatgccctggtccagaagatcaccggactccacgccgccatcgccaagctgccgtcgctcagcccgtccccggacgtagacgcgctcttcaccgagctggtcaccgcgtgcgttcccccgagccccgtggacgtgaccaagctcggcccggaggcgcaggagatg

SEQ ID NO: 6987 - DNA, 303 bp, Triticum aestivum
  Clone ID: uC-tsrow189009c03b1
cctacgtgtccgtaaactcgcccccaccccatctagggtttggccctgccaagagacccgcgacccccttaatccttctcccaacccttatctgtatccctctccatggccacggcggcggcggcgaagcggaagccggtgttcgtcaaggtggatcagctcaagcccgtcaccagcggccacacgctcgtcgccaaggtgctcagctccaagaccgtcctccagaaggcccgcgccgctggcggccccggcccagccgccaagcccaccaggatcgccgagtgcctcatcggcgacgagacc

SEQ ID NO: 6988 - DNA, 217 bp, Triticum aestivum
  Clone ID: uC-tsrow189009c04b1
gttgttctgcttgctttgagcagcgcacggtatttactcagcaagttctagaaaaggcactaaataaattggtcgacaatgtaccgattcctcttctttttatgagaacagttattcaagcactcgatgctttcccagctttggttgattttgtcatggggatactttccaggcttgtcaataagcagatctggaaaatgccaaagctgtgggttgg

SEQ ID NO: 6989 - DNA, 206 bp, Triticum aestivum
  Clone ID: uC-tsrow189009c06b1
gtccgcccacgcgtccgccaagtttaaccccatggcaggctaccccccaccccccggctccggctacccctacggcgccgctggcggctacggagccccaccgccctccggccagaagccccccaaagaaggcaagacctcttcctcctccggccccgacccctaccacggtgctccgcccccgcagcagccttacggcggcggcg

SEQ ID NO: 6990 - DNA, 374 bp, Triticum aestivum
  Clone ID: uC-tsrow189009c07b1
tgggtaggagccacccccctccccattcctacccacccagcatctcggcagtaactctcctccctcccacgcggcgcgcccgctcgccgcgcgcgcgaatctcggtcgcaactggtgtactgttgaaggaaggaaaaatcatcctatttgtcatggcgggaactgactcctcggcgtcatcgagacaaagcagtttcaactcattagcaaaggacctagaacttcctttggagcaagggtgcctcaccatcgttgtacttggggcttctggagatcttgccaagaagaaaacgttcccggcactctaccacctttttgagcaggggttcttacaatctggtgaagtgcatatagtggggtatgcgagaacaaat

SEQ ID NO: 6991 - DNA, 195 bp, Triticum aestivum
  Clone ID: uC-tsrow189009c08b1
tctcacccctcgcctcctcctctcccgagtccctgcgccgccggctcctccccttctcttacgccttctcctccccattcctctcatctccctgcctgggttacagccgccgccctcgccccaggtgagttgttgctgggggcggggcggggcgggctggtgccctcgagtttgccattaaggaagccgtgggtg

SEQ ID NO: 6992 - DNA, 107 bp, Triticum aestivum
  Clone ID: uC-tsrow189009c09b1
ttctacgcgtccgaaaaaaaatctctcctcgctctcgtccgagtcgcgtgaggagaaaggagggaagccggaaaggggttctcgccgtggcggaaggaggagatggc

SEQ ID NO: 6993 - DNA, 200 bp, Triticum aestivum
  Clone ID: uC-tsrow189009c10b1
ggtccagatacagaaggtttagttcagtggttgtgctggacaggaggggccagggaattgctttaagttgttccaagagatgtgagcctgataaaacaatgacatagcagatttccactgtggtcaccttgcaggaccactctcagtggttggcccttctgttcacttacacaaaaacagaaggcagaagatgatattgg

SEQ ID NO: 6994 - DNA, 84 bp, Triticum aestivum
  Clone ID: uC-tsrow189009c12b1
tcgtagcagaagccactagctcactactagtcgagcaatctgttgtttcagaaagacgctatgaagtacttggggcaggtggtg

SEQ ID NO: 6995 - DNA, 172 bp, Triticum aestivum
  Clone ID: uC-tsrow189009d01b1
gttggtgtgtgaagaacccagagtggctggtggggattggtgtctgcactcatcttggttgcattccccttcccaactatggagactttggtggctggttctgcccgtgccatggctcccactatgacatcctatggcagaatccacaagggccctgccccgtacaaccttg

SEQ ID NO: 6996 - DNA, 229 bp, Triticum aestivum
  Clone ID: uC-tsrow189009d02b1
cgtcggttcggcttccagtgggacaccaagaagttctgctggtacctctacttcatgtacttcactctgctctacttcacctactacggcatgctcgccgtggggctcacccccagctacaacatcgcctccatcgtctcctccttcttctacggcgtgtggaacctcttctcgggcttcgtcatctcacagccgacaatgccggtgtggtggaggtggtattcgtggg

SEQ ID NO: 6997 - DNA, 211 bp, Triticum aestivum
  Clone ID: uC-tsrow189009d03b1
cacggttcggccgagagcaagccgcggaccaggcagcagctgccgtagcctctccggtacgtgctgggcgagcaacgcctcgtcttctccttggtcggcatggccctcgccaccctcgtcttcctcctcctctccccctccaccaccaccaccacctcctcaagcagcagcgtggcgcacctggcggcagtggggctggtgtcgcggcagt

SEQ ID NO: 6998 - DNA, 195 bp, Triticum aestivum
  Clone ID: uC-tsrow189009d04b1
atttatatggcagcagctgcttctccgtcctgaatcggatgacttagctcaactttctcagattgaaaccgaaaagcttctagctcaattggttgagaccgaaatgaacaaacgtttgaaggaaggcacttacaaaggaaagaagttcaatgcaatctgtcacttctttggctaccaagctaggggtgcaatgcc

SEQ ID NO: 6999 - DNA, 211 bp, Triticum aestivum
  Clone ID: uC-tsrow189009d05b1
ggtcattgctagacgagaatgctagacttcttgtccaagcaatgattgaagcaatgctgtttgtgctggtttcaccacctttctggtgaacacggaaatggcgggtaactgtgccatgggcagcttcagcttcgatggttttaccattagggcacatcaatactgacgtcatcaagcccaaagagccaaaaccttgagctaagaaatcact

SEQ ID NO: 7000 - DNA, 150 bp, Triticum aestivum
  Clone ID: uC-tsrow189009d06b1
agctccggataccaaagctcatcttcttctccttgaaagctttttgggtccacagatttggaggatgtcttgcaactgcggatcaggctgcagctgcggctcagactgcaagtgcgggaagatgtaccctgatctgacggagcagggcag

SEQ ID NO: 7001 - DNA, 264 bp, Triticum aestivum
  Clone ID: uC-tsrow189009d08b1
tctacgcgtccgcgcgcacgaaccccctccgccgccgacctcgcgtcttctcctgcgcatctcggaggtgcttcctagtttccacgatgaagctgatcgctgcctacctcctcgcctatctgggtgggaactcttccccaagtgccgctgacgtcaagaacatcctggactcagttggtgcccaggctgatgaagaaaagcttgagttccttctggctgaactcaaaggcaaggacatcacagaagtgattgcatctggaaggg

SEQ ID NO: 7002 - DNA, 170 bp, Triticum aestivum
  Clone ID: uC-tsrow189009d09b1
tcacgcgtccgcccacgcgtccgcctcctgtccctcttccactccggcggcggcagcagcagcatcagcgcggaagagccaaggagccgaccatggcgacgatcgtcaacaccacggaggaggagccgatgctggcggtggtgcgctccacggcggagctcgcctgggcc

SEQ ID NO: 7003 - DNA, 79 bp, Triticum aestivum
  Clone ID: uC-tsrow189009d11b1
tagacgcgtgggtacctggacagaccgaggcaacgatgagtgcagaagttgaactgatctctacaatgggtgaaaagaa

SEQ ID NO: 7004 - DNA, 175 bp, Triticum aestivum
  Clone ID: uC-tsrow189009d12b1
atcggtggcgcagggcggcggcgcggacgagaaggactacaaggagccgaccccggccccgctcttcgaggcggaggagctcacctcctggtccttctaccgggccgggatcgccgagttcctggccaccttcctcttcctctacatctcggtgctcaccgtgatgggcgtggtg

SEQ ID NO: 7005 - DNA, 239 bp, Triticum aestivum
  Clone ID: uC-tsrow189009e01b1
gctatgttaaagcctctatgagcagaaacctgaagagccagctcctgccctgccatcggtggctgaaagcactacagctaggagcaaatctcatacttcccgatttgaatatgtggaaaatgtaccttctgctgggagcagctctgcggaaaaccaggcatttgggcatgttgcgcccccaaagtcttcaaactttttcggtgaatatgggatggacagtggatatcacaagaaatcta

SEQ ID NO: 7006 - DNA, 110 bp, Triticum aestivum
  Clone ID: uC-tsrow189009e03b1
agcgtcctccacctccgccgactcctccctccaacctttccccaccatggcgtcgccctccgtcttcgccgggatcgcgcagggcccggaggaccccatcctcggggtga

SEQ ID NO: 7007 - DNA, 210 bp, Triticum aestivum
  Clone ID: uC-tsrow189009e04b1
attgctcctcctctgtcctctcctgtgtctttctcgccaaccacagagtggcactgtgattgtaatccagctggaagaccatcctactgtctgcagcattgccatggacgccacaaagacagcagccaaggctgtggcggcaggcaacggcgacgcagacgccgcgccgtcgacccggcggacggcggcgccgaggccagtaccttggcg

SEQ ID NO: 7008 - DNA, 69 bp, Triticum aestivum
  Clone ID: uC-tsrow189009e05b1
ctcacatcattatgctgaaaagtactagttcatgttctccttcgacatagttatgattctaggatttta

SEQ ID NO: 7009 - DNA, 80 bp, Triticum aestivum
  Clone ID: uC-tsrow189009e07b1
tcgtctaactacgccaagcacggtttcggggctacaccgttcaacgcgacgagctttaacgcatacgtgcgggaggggag

SEQ ID NO: 7010 - DNA, 215 bp, Triticum aestivum
  Clone ID: uC-tsrow189009e08b1
ttcatctgtgcagcagcaggaaacaaccggggatgaaactcaagttccagtcgaggctgctgccgaaactgacgctccagctcaagaagaaaaacgggaggtggagaaagacaaccccaagaaccgaatcgacttccttggattcttcgccatgatctttgagaggttctgctccccagctgacaagaagaaagactagttccgtgtcagctgcc

SEQ ID NO: 7011 - DNA, 286 bp, Triticum aestivum
  Clone ID: uC-tsrow189009e09b1
tttgctagataatctcgtggaggatttgttgagtgattttgaatacgaactccagcctccatatttgttgtatcggaatgccacacaggaagtaaatggcatttggttttataaccaacaggagtgcgaagctgttgctagtctgtttggaaggatactgaatgcttatgcgaaagtgcccccaaagccgaaagtgccatccataaaaagtgagtttgaggaattagaggctgttcctacatcctctgccatagatggtccccttgaacctcctccatcatctacc

SEQ ID NO: 7012 - DNA, 211 bp, Triticum aestivum
  Clone ID: uC-tsrow189009e10b1
tcgctcgcgtccgcaagtgcaagtcctcccaaatccacgcatccctcgcccgcgtctcctcccgttgccgcagcagcaagagaatgggcagcgtcgacgcctccgagacgacggtcaccgggtgggccgccagggacgccaccggccacctctccccctacagatacaccctcaggaaaacaggacctgaagacgtggtgttgaaggttaa

SEQ ID NO: 7013 - DNA, 232 bp, Triticum aestivum
  Clone ID: uC-tsrow189009e12b1
ttgctgacgcgtgggtgcactccgcacgtcgccgcaggggcttggccctcagattgaggtcatccgtgctgccaccaagtcaatcgagcgggagatcaattccgtcaacgacaatccactcatcgatgtctcgcgcggcaaagctatccatggtggcaacttccagggcacgcccatcggtgtgttcatggacaacaccaggcttgccattgctgcaatcggcaagctcatg

SEQ ID NO: 7014 - DNA, 107 bp, Triticum aestivum
  Clone ID: uC-tsrow189009f02b1
cctcgctaccgagcgcgcgcgcgcgcacgcacggacttcgacaatcgtcgtcggcttccgagcgagaccgaccggccaatcttccaagaaaacgccgggggggatga

SEQ ID NO: 7015 - DNA, 149 bp, Triticum aestivum
  Clone ID: uC-tsrow189009f03b1
ggtgtatctcaccggactccccgccgccgccctcgccgccaacatgaccgaggtctgcgtcaaggccgccgtcggccaccccgacacgctcggcgactgccccttctcccagagggtgctgctcacgctggaggagaagaaggtgccct

SEQ ID NO: 7016 - DNA, 116 bp, Triticum aestivum
  Clone ID: uC-tsrow189009f04b1
gcatgcaccctgcaaggcgcagctcggtgccgtgagcggtgaggagaggccggtccgtcgattgatcgattccgtttccatatcgctccccggaccccgagatgggattttgatgc

SEQ ID NO: 7017 - DNA, 205 bp, Triticum aestivum
  Clone ID: uC-tsrow189009f05b1
tgtaattactttactcggtagaccgacgcagagaagcatatgctaccatactgcattcagcaagcgagtatgtctgtggcgcaattgcagcagctcaaagcattcgtcaagcaggatcaacaagggactttgttattcttgttgatgacaccataagtgaccatcaccggaagggccttgaatctgcgggttggaaggtgagaat

SEQ ID NO: 7018 - DNA, 143 bp, Triticum aestivum
  Clone ID: uC-tsrow189009f10b1
ttcgatcgatccagcacacgcagcagattaagcagcgacctccttcgaccgaagatgagccaggacaaggccgccggcgacaaggccgcggcggagcccaagaggcagacgccgcggcttaacgagcggatcctctcctccct

SEQ ID NO: 7019 - DNA, 139 bp, Triticum aestivum
  Clone ID: uC-tsrow189009f11b1
tttgttacgcgtccgcctcaactggctgcagtgcgcgccctgcctcgactgcttccaccagaccggccccgtcttcgaccccgccgcctccgcctcctaccgcaacgtcacctgcggcgacgcgcgctgcggtctcgtc

SEQ ID NO: 7020 - DNA, 265 bp, Triticum aestivum
  Clone ID: uC-tsrow189009f12b1
ttgctgtccctccccatccccaagtcataaacccaaggcggacttgccttcctcctccccaactactcctcacacacacaatggtgaaggctgtggctgtgcttaccggcagtgagggtgtcaagggcaccatcttcttcacccaggagggagagggcccgaccaccgtgacgggaagtgtcaccggactcaaggaagggctccacggcttccatgtgcacgctcttggcgacaccaccaatggctgcatgtcaactggaccaca

SEQ ID NO: 7021 - DNA, 231 bp, Triticum aestivum
  Clone ID: uC-tsrow189009g01b1
cttatactaaaagagtgacactgggcatgttactcaagtaatatgttcgaccatagatgccaagtctcttgagaatgtcaactcagagaactcatttgacagtatcaaaattgatttgggggaccaaaatgtttcaagtagcttggatatcaaaaaaggcaattcctttgcagcaggtcagtcgtgctctgataataatgcaactgaagctttgaaccatcttgcaaatgc

SEQ ID NO: 7022 - DNA, 268 bp, Triticum aestivum
  Clone ID: uC-tsrow189009g02b1
catgagcttaagttgctcgctgacgacgtattctcattttggcttaaccgggattcggatgcactttctggtggtgagctcgtctttggtggcatggacccggatcactataagggaaaccacacctatgtccccgtgagccgcaaaggttactggcagtttaacatgggcgatctcttgattgatggccactctactggcttctgtgccaaaggctgtgctgctattgtggactctgggactttcctgctggctggcccaacagcta

SEQ ID NO: 7023 - DNA, 108 bp, Triticum aestivum
  Clone ID: uC-tsrow189009g03b1
gtttctttctacgtgcaggcgctctcctccctgcagcagcagcaacagcagcagctgcaacagcagagcagcgcgcgcagcggcaccaagccgtccatggggatgggg

SEQ ID NO: 7024 - DNA, 183 bp, Triticum aestivum
  Clone ID: uC-tsrow189009g05b1
ggtcgtgcgagcgagcggaggaggagggttcagagcagcttttttttacctacctttcttgcttggatccagccgttcccgatcgagatctgccccggcgggcgatgagagcatgacccccgcgcaggaccccttctacatcgtcaaggacgagatccaggattccattgacaaaatacaaga

SEQ ID NO: 7025 - DNA, 111 bp, Triticum aestivum
  Clone ID: uC-tsrow189009g07b1
ttgcctacgcgtccggagatatggaaagagccggctcaatcctgtgaagtggaagacaatgcatgaaattgtttgtggacgctcggggaaacctttgcatgagaacaggtg

SEQ ID NO: 7026 - DNA, 219 bp, Triticum aestivum
  Clone ID: uC-tsrow189009g09b1
ttgtacaatggtaaatgtgagtttcgatgttcagattatgcgggctacacttgtcaaaagggttcgacaatactgcccagcctgtcaatgtgtcatgatgtactggttcgggattctgatgggcagcattgtgcaccaagtgaactcagcatactacagcaactcgaagcagtagttcttgtgccaaattacaatagattgatgccaagtgggcggacc

SEQ ID NO: 7027 - DNA, 218 bp, Triticum aestivum
  Clone ID: uC-tsrow189009g10b1
tggctccacagcacctacctaagccctaaacccaacgcgcccaccacctgcctcgtcgccgccgccggcgagatggccggcgcgcgctcgcaggtcaacaagccgcacaagacgcgcttcgcctccaaggcctcccgccactcgcacaagatcgacaaggtcaggagcgggaagccagcgggcagccaccgtgccgtcgtcaagggcgcccgtgcggt

SEQ ID NO: 7028 - DNA, 235 bp, Triticum aestivum
  Clone ID: uC-tsrow189009g11b1
ttgatctctacatgaagcgctacatcaagaacctctctgtcaagcttgaaggggatgacctagatgctttcaagaagaatgttgagtccgccacaaagtatcttcttagcaagctcaaggaccttcagttctttgttggcgagagcatgcatgatgatggcggcgtggtgttcgcctactacaaggagggagctgctgatccaacttttctgtactttgcacatgggctgaaaga

SEQ ID NO: 7029 - DNA, 174 bp, Triticum aestivum
  Clone ID: uC-tsrow189009g12b1
aggtttccgccgcgatctcgtctcgcgacgcactctctatctgagattaggaatcgggcgaggcctgcagctcctgccgacatggcgctcgttttgcattcgggcagtggcaacaagaatgccttcaaggcacttattgctgcagagtactgtggggtcaaggttgagctgacc

SEQ ID NO: 7030 - DNA, 148 bp, Triticum aestivum
  Clone ID: uC-tsrow189009h01b1
cgtactcgtgggcggacgcgtgggtacacttctgggggatctctggacccgatcaccggggtgaaccagcgctccttcttcatctacatcaacaaccagacggcgcaagagcagatggacgtcatcgcgtggagcggagggatagggg

SEQ ID NO: 7031 - DNA, 377 bp, Triticum aestivum
  Clone ID: uC-tsrow189009h04b1
gtttcttcctcctcctcctcctcatctcgctattgctttccgctcccacaccacgcgcaaacgtccacaaccctttgtatttccacacaacaccctcccctgtacgtgaccaactccgacagcggagacacgaatcgagccgtgtcgacaacaaacaattagcccagaccccgaggacaccagcgcaaaaacaccgcccgccaccggggcggtcaagagaccgccgccgccggccgatcggagcaccattggagccgtgcgcgccccttcgactgcccccgcgcgttcgggcgctgacccgtcgcagcgccgtcgtccgcgctgtcgcgatggagtctgccggctactacaccaactgcaagaagaccgacggaatc

SEQ ID NO: 7032 - DNA, 212 bp, Triticum aestivum
  Clone ID: uC-tsrow189009h05b1
ctctatttaacccgcgatcgagcgaggcaaaacaggtcgactagtgaggcgcccagatccaaaccccccctcccctctctctctccagatctcgcgtcccctgcctctcctcggatctaaccactccatttcctccccactcgccccgccgcgacccggaggaggaggaggaggaggacggccgctcaaaaacaccgtccgccaccggggcg

SEQ ID NO: 7033 - DNA, 214 bp, Triticum aestivum
  Clone ID: uC-tsrow189009h10b1
tgtggaaaggctcgtcgtgcacgagatggactcggcacacaaccagctctccaatatggacgattactcgtatgttcaatgaagctcttgcatctcatcagtaataagctacattggatcaaagacgctcaccaaggaaggccaagacatatgtaaacgattccgcacagcctcgcttgcagaattgaaacatctatccttgggtcatgttctg

SEQ ID NO: 7034 - DNA, 119 bp, Triticum aestivum
  Clone ID: uC-tsrow189009h11b1
tcctcgcgtccgagaacagagaagagcaggggccagcgtttaatcagagggtcgatgaatgaaagaagacatggacccggacatgggcgagaacttcgtatactactgggagacgcagt

SEQ ID NO: 7035 - DNA, 141 bp, Triticum aestivum
  Clone ID: uC-tsrow189009h12b1
ttatgaacagtccaggctccagagagcgcccccctgcacagagtgcgagagggagagagggagagagagcggaccagtcgtcgccggcggctagcagcggagcggttatgaaggagagaggcgggtcgagggcggcggtgg

SEQ ID NO: 7036 - DNA, 281 bp, Triticum aestivum
  Clone ID: uC-tsrow189012a05b1
gtgccttcaatgatttaaatataactgcaccgggggggagttctatgtaataatgtgatcatgtagttccccaccacgcagaaagagacatgcatgtacagctgtgtatatgagctgcccacatgatcaaactttgatccatgtcctcacactatagtatagaggatgcactacaattgttcaagcaactctgcacagatgcgaacaacaggtcaaatcagttccctctagataactctctaaccatgaaccatggaatttaatttgctcagagaattgta

SEQ ID NO: 7037 - DNA, 349 bp, Triticum aestivum
  Clone ID: uC-tsrow189012a08b1
tcgctttggccagttcgtcgacgcggctttcgggggggcgtttttgacgcgggacctacgttccgacgaggtgatcgccaggatcgccgagggagacaaggccgacatcgacctcgccgtgaaggcctgccgcgaggccttcgacaacggcccatggcccataatgcccggctgtgcaagggcccggatcatgcacaagttcgcggacctggtcgaccagcacgtcgaggagctggcggtgctggacacggtggacgccggcaagctctttatgatgggtaagatgatggacatccccggaggcgccaacttgctccggtactacgccggcgccgccgacaagatccac

SEQ ID NO: 7038 - DNA, 300 bp, Triticum aestivum
  Clone ID: uC-tsrow189012a10b1
tctgtcgggcaccgtctcctgcgggagtgcgggcgggagtactttcacatggacatgttcttctccagggagttcatggagtgcgccaagaggcagtccagcatggcgcagtcggtctcgcgcggcggcggcatggtcgccaacacgtgccgcgcgctcgagggcgagttcgtcgacgccttcgccgagaccctcgccgccgtcggccagaggatcttcgccatcgggccgttgaaccctctgctggagccgggccagatcgacgcgaagcaggggcggcacgagtgcctggactggctc

SEQ ID NO: 7039 - DNA, 175 bp, Triticum aestivum
  Clone ID: uC-tsrow189012b04b1
gttatttagccgcagcgcccgcacgcctcgacccaagggatctttatgggggtttcctactttatggcactgggcatcaagcgcgcgtcgcggtcgcacacctaccaccggcgagggctgtgggccatgaaggccaagcgcggcggaaccttccccaaggccgggaagccagccg

SEQ ID NO: 7040 - DNA, 155 bp, Triticum aestivum
  Clone ID: uC-tsrow189012b09b1
tcgctcatcgcgtccgaggaaagggagccgtggaaagctctccccccctccccaaatttcatcttcgttcttccgctcctctcctcgcctcgcctcgcctcgcccggaccccggccggattctcgtcaaggaggaggaggaggaggagggggagg

SEQ ID NO: 7041 - DNA, 309 bp, Triticum aestivum
  Clone ID: uC-tsrow189012b10b1
tcggtcccgaggatctttgagtgacgcctgctgcatggccagttgcgttcccagaaaccttcctgtcctccttcgctgagttaacagtcatgtaattttcgtgtgcattctgctggggtgttgtcctgggatagcccctttacataataattgtaatcccctctgtgctgttcatctacacttgttcttcctgggcgtgccagggacgtaaaatttcttttggttatatgatgcccatagttttcacatgcctaaatttgtttcttctttcgccctgctgggccgtaagagttgctttttgctggaaaa

SEQ ID NO: 7042 - DNA, 140 bp, Triticum aestivum
  Clone ID: uC-tsrow189012b11b1
atcgcttgtgttctaaaatgtgtcgtcatatgacccagtgtaagagctgcattgagcatgctgattgacatggtaacctgcgtggtttgtgcgtggtgtttgttactggcttttgctaatacaagtgtctattgtgaggt

SEQ ID NO: 7043 - DNA, 394 bp, Triticum aestivum
  Clone ID: uC-tsrow189012c07b1
ttgctacgcgtccgggaacgaggccgtcgatctggagaacattcccatcgaggaggtgttcgagcagctgaaatgcacgcgccaggggctcacctccgatgagggggcgcagcgtgttgaaatcttcggcctcaacaagctcgaagagaagaaggagagcaaagtcctcaagttcctgggattcatgtggaaccccctctcctgggtcatggagatggccgccatcatggccattgcgctggccaacggtggtgggaagcccccggattggcaggatttcgttggaatcatcgttctcctggtcatcaactccaccatcttcttcattgaagagaacaacgccggcaacgccgctgctgcgctcatggccaaccttgcgcccaagacaaaggtg

SEQ ID NO: 7044 - DNA, 163 bp, Triticum aestivum
  Clone ID: uC-tsrow189012c08b1
tcgctgacgcgtgggcggacgcgtgggcgacctgggggagtacttcatgaggtcggacacctagttcactgacaactacaacagctggacgacaccgacgacggagcaggagccggaggaggagcagtactaccgcgaggagtacgtgccttcatacaggccg

SEQ ID NO: 7045 - DNA, 437 bp, Triticum aestivum
  Clone ID: uC-tsrow189012c09b1
ttgataaacgccggctctcccccgctccgcctccctgcctcattctcccccgctccgcgccctccgccgccagatcccttcgagccccccgcgcccccgcgtcgaagatgagggagtgcatctcgatccacatcgggcaggccggaatccaggtcggcaacgcgtgctgggaactttactgcctcgagcacggcatccagcctgacggtcagacgaacggtgacaagaccatcggaggtggtgatgacgccttcaacaccttcttcagcgagaccggagccggcaagtacgtgccccgcgcggtcttcgtcgacctcgagcccaccgtgatcgacgaggtccgcaccagcgcctaccgtcagctcttccaccccgagcagctcatcagcggtaaggaggacgcggccaataacttcgcccgtggtcactacacaatc

SEQ ID NO: 7046 - DNA, 310 bp, Triticum aestivum
  Clone ID: uC-tsrow189012c10b1
tctgttcgcatcatcatccctgataccaaaggggatgtttttctccttgaaatctttttgggtccacagatttggaggatgtcttgcaactgcggatcaggctgcagctgcggctcagactgcaagtgcgggaagatgtaccctgatctgacggagcagggcagcgccgccgccgaggtcgctcgccgtggtcgtcctcggcgtggcgcctgagaacaaggcgggacagttcgaggtggccgtcgggcagtccggcgagggctgcagctgcggcgacaactgcaagtgcaacccctgcaactgttaagct

SEQ ID NO: 7047 - DNA, 397 bp, Triticum aestivum
  Clone ID: uC-tsrow189012c11b1
ttgctcacgcgtccgcccacgcgtccgggtaagggagcctgctatggcgtctgctgaaacaggtggcgacaagtaccggtcgttcatggacggtgagggcgagaagaacaccgtgtggaggcatggagtccctcccaacttcgacgtggtgaacaagctcttcgaggaagagaggactaaggaatgggcggaggggagtgtggaagagaaggtgcagcggttgctcaagacatgggagatggagatgttccacaagttgcggcccgaggaccagaagagcgtgcactcccagggattcaccagcagcaccaacgggatgaagcctctgacccgaaaggagtggaccgccatcggtggctacaacgcgttcctggcaaccaagctgccgttggagcac

SEQ ID NO: 7048 - DNA, 357 bp, Triticum aestivum
  Clone ID: uC-tsrow189012c12b1
tcgtacagaagcgtctggctgcctccgtgctgaagggctgtttgcgcatggtctggcttgtaccccaacgagtcgagcgagatcggcctcgccaactcgcgccagaacatccgcaagttggtgaaggatggtttcgacatcaagaagccgcaggtgatccactcgcgcgctcgtttcaccaagcgtaacgaggccaagcgcaagggccgccacaccggcatcggtaagcgccgtggtaccgtcaacgcgcgtcttccgttcaaggacatctggatgcgccgaatgcgtgtgcttccgtcgtttctccgcaagtaccgtgacgccaagaagatcgactcgcacatttaccacgagctg

SEQ ID NO: 7049 - DNA, 428 bp, Triticum aestivum
  Clone ID: uC-tsrow189012d02b1
gtcctttttcgtgtgcgcgctcttcgcgttcgggatcccgtacctgtcggccctgtggatctggctgggcttctccaccatcttcagcctcacctacatctttgcagcctgcgtgctgttgctcaaggacggcttccgcaatccgcctcgggactacagcatccaaggagacccgttcagcagggtgttcaccaccatcggcgcggcggcgagcctggtgttcgcctacaacaccggcatgctgccggagatccaggccaccgtccaggcgcccgtggtgaagaacatggagaaggcgctgtggttccagttcaccgccggctccctgcccctttacgccatcatagtcatcggctactgggcctacggcaaccagaccaccacctacctgcttcacaacgtcactgggcccctgtggatcaaggcag

SEQ ID NO: 7050 - DNA, 300 bp, Triticum aestivum
  Clone ID: uC-tsrow189012d03b1
tcggtctgtggatgtcaaccggggcattggaatgcttggggcttgttttggcatgtctaacagttcgctacaaacaagggagaagctctatttgatggccgttggacactacagaaatggggattacacaagaagccgagagcttctggaaagatgcttagaggttcaacctgactggaggcaagctcttactatggaaaggctacttgaagagaaaaccaaaagagatggcatgattggcatggtcattgagaccggcgcctgtggacttgtggggcttgttgctggtggaatcatagc

SEQ ID NO: 7051 - DNA, 396 bp, Triticum aestivum
  Clone ID: uC-tsrow189012d06b1
cagcgcgtccggggcgttggagggggccaactacctggccacgggcaagatggaggtgcatctccgagcagcagctggtcgactgcgaccatgagtgcgacccaggagaacctgattcatgcgatgctggatgcaacggtgggttgatgacttcagccttcagctatctgctgaaatctgctggccttgagagagaaaaggattacccttacaccgggaaggacggtacctgcaaatttgagaagtccaagggtgctgcttcagttcaaaacttcagcgtagtcgctgttgatgaagaacagattgctgctaaccttgtgaaatacggaccgctggccatcggtatcaacgccgtatacatgcagacatacattggcggagtgtcatgcccataca

SEQ ID NO: 7052 - DNA, 368 bp, Triticum aestivum
  Clone ID: uC-tsrow189012d08b1
tcggttagcaccatcaatggcgatggcggccatgggggccttccccctccttcccctcgcgctcctgctcgtcgtggcgcacgcgcggctgcagcccaccatccggctgccgtcggacgacggctccgtcgggaccaggtgggccgtcctcgtcgccggctccaacgggtactacaactaccgccaccaggcggatatttgccatgcctaccaaatattgaagaagggtggtctcaaggatgagaacatcatcgtcttcatgtacgatgacattgcgcacaacctggagaacccgaggccgggcgtcatcatcaaccacccccagggtggagatgtctatgctggggtccctaaggactacactggga

SEQ ID NO: 7053 - DNA, 312 bp, Triticum aestivum
  Clone ID: uC-tsrow189012d09b1
tctttctatgcggcctttgggccataagactggaaagtatgtttttcgctaaaacggtgaccccaggagtaccgaaggaaaagggtggaagctcacggcgcgctaccctgccaggatgccactagatagttcatcatctgatttataactatttctgatcttcattagtgagtatagaggaactggagcacatatcagtttacctgtgtgcccacctcgctgccgcaacctaccgtcccattcggtactatcgtcaagttatgtagtctttatggacatggttaatgatatcttgtcaggaaaaaagattgc

SEQ ID NO: 7054 - DNA, 474 bp, Triticum aestivum
  Clone ID: uC-tsrow189012d10b1
tcttaccgcccacctcctctcccgcagcctcgccgccgccaggacgctctccgccgccgccggttactcctcctcctcctcttccgtcaagatggcgcgctcggcgctggacgaggtgaccgacaccggcgccttcgaccggacgccgtccaccttccggagcttcgtgtccagggacgcctccgcccgcttccccgcggtggcgggcaggtaccacctctacgtctcctacgcctgcccctgggcgtcccgctgcctcgcctacctcaagctcaagggcctcgaccacgccatcagcttctcgtcggtgaagcccatcttcgagcggaccagggagtccgacgaccacctggggggggtgttcccggccaccgccgacgaggtgcccggcgccagccccgaccccttcaacggcgccaagagcgtcagggatctgtacgagatggcgagcaccaactacaccggcaaaccgac

SEQ ID NO: 7055 - DNA, 384 bp, Triticum aestivum
  Clone ID: uC-tsrow189012d11b1
ttcgttccctgccgcgcctcggcaccacgctgcactacaactacacggccgagggcaactcggtcgccgtggcgttccgcgcgccgcagacgagcaaggccggcgggtgggtggcgtgggggctcaaccccaacggcacgggcatggtgggcacgcaggccgtggtggcgttccggcattccaacggcagcctcgtcgcgtacccgacgatgctggacagctacgcgccgtccatggcgcccgcggacggtgccgagctggcgttccccgtgtcggacgtggcggccgagtacgccaagaacggcaaggagatggtcgtgtacgcgacggtcgcgctgcccgggaaggggagcaagttcacccacgtctggcagcaggggggct

SEQ ID NO: 7056 - DNA, 266 bp, Triticum aestivum
  Clone ID: uC-tsrow189012e05b1
tttatttgtccggcgctcccgtgtgtcggccgctcggggccgctcgctatgctccacccaatcctccgccacctcggcgcttacaccaaaccggtgacggggacgcgtgtctccctccctgtcacacacatccggctgctagaaccttcagcttggccgacctgggcagggtcgagcagagcagagcacagtttacgccggacccggttctcaccagatccgggtgaataaccgctgctctacttggatctgctaggagggggaga

SEQ ID NO: 7057 - DNA, 212 bp, Triticum aestivum
  Clone ID: uC-tsrow189012e06b1
tcttgttcaagcataaggaggctgtgaaggctgctttggacgcggttgaaaagaagaaggaagaggaggacgcttccaaggctggtgaggacgatgatgactaggatgatgaggatgcctatgatgaggacacggatgacagggctgggtctgatgtcgagtttgatgacgagaagcacgatgagctctagatggatggtgaggatgagagg

SEQ ID NO: 7058 - DNA, 381 bp, Triticum aestivum
  Clone ID: uC-tsrow189012e07b1
tctgtgtgacgtcacaccgctctcgcaggggggggagattgccggaggtgtcatgtccgtgcttatcccaaggaacacgacaatccccaccaagaaggagcaggtcttctccacctactctgacaaccagcccggcgtgctcatccaggtatatgagggcgagagggcgaggaccaaggacaacaacctgctcggcaagttcgagctctccgggatcccaccggcgcccaggggtgtcccccagatcaccgtgtgctttgacattgatgccaatggtatcctgaacgtctctgcggaggacaagaccaccgggcagaagaacaagatcacaattaccaacgacaaggggcggctgagcaaggaggacatcgagaagatggt

SEQ ID NO: 7059 - DNA, 416 bp, Triticum aestivum
  unsure (1)..(416): unsure at all n locations
  Clone ID: uC-tsrow189012e09b1
tcctacgcgtccgcggacgcgtgggtcgcaggtgggactaagcaggatgccatggatcttcttcaaggacgttacatcacatctgttagtcgagacatggcacctccaacaaaagcaggatttgtagagagctatgcgtccgcccgccttgcttttgcattggtttccggagcttttatgttcatgatgatgtcactgagacatgctcggcatgatgctcgtcatttattgctgtcacttctctgggctggtctttgcatcgggatcacacactttgtgagaagcaatggccgggtattcacgaaccggccccgtgcccacaattcgtcacacccttgatggaaagcaggcggngtgatagattatcattcgttcatcaaacaatggcagtactccacttttttctatgtagagat

SEQ ID NO: 7060 - DNA, 458 bp, Triticum aestivum
  Clone ID: uC-tsrow189012e10b1
ttgttacgcgtccgctccaccctctccagcgcatcgcctacctcaacatgtcgacctacccgatcgtcacggtgttcatcctggcctacaacctcttccccgtcctctggctcttctcagagcagttctacatccagaggccgttcggcacgtacatcatgtacctcgtcgccgtcatatccatcattcacgtgatcggcatgttcgaggtgaaatgggcggggatcacgctgctcgactggtgccgcaacgagcagttctacatgatcggggccacgggcgtgtacccgacggcggtgctttacatggcgctcaagctcgtcaccgggaaggggatatacttcaggctcacgtccaagcagacggacgcctgctccaatgacaagttcgccgacctgtacaccgtgcggtgggtgccgctgctgctcccgaccatcgtggtgctcgtcgtgaacgtc

SEQ ID NO: 7061 - DNA, 376 bp, Triticum aestivum
  Clone ID: uC-tsrow189012e11b1
ttgctcacgcgtccggggcaccagttcaggacactgggccgctttccagctgccagatcttcagccccaggagctccgaagcagtctctccaatggcggtcaaggtctatgtcgtgtactactccatgtatggacatgtcgctaaactagctgatgagatcaagaaaggagtgtcatcagttgaaggtgtcgaagctaaaatatggcaggtccctgaaactctccccgaggaagtacttggaaagatgggcgcgcctcctaagcttgatgccccaatcatcacaccacaagaacttgcggaggcagatgggatcctctttggtttccctacaaggtttggcatgatggctgcgtaaatgaaggcattctttgacgc

SEQ ID NO: 7062 - DNA, 106 bp, Triticum aestivum
  Clone ID: uC-tsrow189012e12b1
ttcgttacgcgtgggcgaggacaagatgaaggagcgggaggctttgagcaaccccatgattttcaagatgtaccagggtgctggtgccgacatggagggcggcatg

SEQ ID NO: 7063 - DNA, 318 bp, Triticum aestivum
  Clone ID: uC-tsrow189012f01b1
tttcgttaccggaaaagctacttggggatcttgggggttttttatccaagaagtggattccaaataagaacggcgcaatcaggggccctatgctgaccagagatgattccttcatacgcaagggcagccatatggagcagaggcacaaactggggctggcagatcgtccgcgtcgatccaatgcacgccaattcctatccgaacccacatcatagcttgagaaagtctagggggagaaggcaaagcaggatgatggcctatctgatcttagcgacatactgaccgagttggaaggaatggccattgacatgggaactg

SEQ ID NO: 7064 - DNA, 118 bp, Triticum aestivum
  Clone ID: uC-tsrow189012f02b1
ttcgtttccgcttctctagcgagcgagcaagctaggcttggaggtgaccgaaaatgccggtcagtaggatcgccgtggggagccaccgtgaggtgtacgaggtgggcgccctcaaggc

SEQ ID NO: 7065 - DNA, 222 bp, Triticum aestivum
  Clone ID: uC-tsrow189012f03b1
cgggtcttgaatatctccataataattgattaagaaccgtactccacagggacatcaagccaggtaatgggatgctggatatggacttcactgctaaactgtgtgacttctgtttggtgacacagcttacacgtgccgcaacctcacgctcaacagataacattattggaacactaggctacatggacccattataccagcagaacggccaggttactaaag

SEQ ID NO: 7066 - DNA, 370 bp, Triticum aestivum
  Clone ID: uC-tsrow189012f04b1
cttgtttaccggctcgccgacgtcgaccgctccgcccgcaagaagaacagcctcaggttggatgactgggtgctgtgccggatctacaacaagaaaggcgcctcggagaggccgagcgccggtgaccggaccgcgagcgcgagccccgggcacgcggtcgtcggatcgccgccggagcagaagccggccctgctgccgccatacgcgccgcagccgttctcggacctggcggcgtactacgaggtgaggccgtcggactcgatgccgcgggcgcacgccgactcgagctgctcggagcacgtgctgacggcgtcgtgcgagcggccggaggtgcagagccagcccaagatctccgagtgggagcgcacgt

SEQ ID NO: 7067 - DNA, 329 bp, Triticum aestivum
  Clone ID: uC-tsrow189012f05b1
cttcttttccgcccgccgtcatccagtccgccatccggatcccccagcatcgcagccgaaatcaaatctgccctccccatcccatctccactccccatcccatctgatctccacccacgatggccaatatccaccacgtcaacaacgttgcacagatgctcggtgtcttagtccagttcgttggagtcgacctcaatgcagcagccggccacaccgtgtttatccacggcgtgaactccatcaacgactgcgctgagatgctgcgccacgctgagtacctcgaagacagaggtgcagtcgactccaacgtagattcactccgtctgctg

SEQ ID NO: 7068 - DNA, 432 bp, Triticum aestivum
  Clone ID: uC-tsrow189012f06b1
ccctgctctctctctctctctctctctgccggtccctctctctctccttttattctgcaaccaatcttgggttgcgccggcgggctccagtacggccgccggggccggggaaagcgaagcagcagctcgccagtgctgcgggaaaggaaacgcgaagacgctgaatataaatctacagaatgatggctcctgagttagataagcaatgctcaaacatccagctgggagaagaactagagatatgtgatatcaagcttgcgctcaaggcattgcgaaagaagatccttagtttggattttcataactccttgcatgttcatgatccacagaactcatttgagtacttagaagtgttatacaaattgcggcagctgtctgagaagttaggtaatttggaccctggtggagaagccaaagagcacaaggaactga

SEQ ID NO: 7069 - DNA, 392 bp, Triticum aestivum
  Clone ID: uC-tsrow189012f07b1
tcgatcccatggacgcggctcagtcaaaatgggggttcctaatgcaggtgttcaagatgccaccggataccaaccggacaaagctcttcccaccggccaatttcaagatctctggcggctcatcgctgaacccagactatagctgtggccagccagtgcctgtcagccccaccgggttccctaatcccagcgggctcgactctacaacgctggcggttgcgacatggcaggtggtgtgcaacattaccacggccaagggggccaagcccaagtgttgtgtcaccttctcggctcactacaatgactcagtcattccctgcaacacctgtgcatgcggttgttctgtgaaccgccggggtcctacctgcagcacgactgctccatccatgatc

SEQ ID NO: 7070 - DNA, 352 bp, Triticum aestivum
  Clone ID: uC-tsrow189012f09b1
tcgtttcacgcgtccgcccacgcgtccggttcctttcaatgttgtaccagttcaacagatagttcctcagagtggtggagaaggccaagctgagttagttcttgattcttgtattggtagttccactgtgcatgacccgtctaagatgtctgctgagctttgcattggtgaatcttgcacttctatgttacagttgacgaagaggtatctccgattggcaacaactaatgcatcatggactgcgaacaattcttttgcagtctacccgtattattatggggcttactttacttcgggtgtggcattgagtggcaccacaggctatattactggtgattatgtggggcttttg

SEQ ID NO: 7071 - DNA, 295 bp, Triticum aestivum
  Clone ID: uC-tsrow189012f11b1
tagaaaataaaaatccccaatccctccgcccacggaccactgctccccgtcctcccctcccagatctgccgggcacggccctcgccggcggcgttgggtccgcgatgcctcggacggcgcagggggcctcgcccctgctccgcgacgacgccggcgccctcctcccctccgccatctgctgctcccaccgcctcaagccctggtcttggcaccccaatatccactcctcctagcgcgccccaaacctgcctgccgtccccttcctcccccctaccttccctcccccttcctccct

SEQ ID NO: 7072 - DNA, 309 bp, Triticum aestivum
  Clone ID: uC-tsrow189012f12b1
ttgatacagtaaacagagagctcgctctccgggaagggtgtctttgaagaagaggaagattaagaagcagcgtggagcacgctgctgctacctggtcatgctctcagcagtgtgaatctccagaagcatgcttgccgtgccttcttccgggtgcaccggaggctggcatgtgagcaggggtgcttcagtgacgcagaagaaaaaaggcaagtcttatcggcaagggaaggctacgcctttcttccaggtctccctctctccatctaaatctgtgtttggaggagggggctacggttagttcacccaccg

SEQ ID NO: 7073 - DNA, 319 bp, Triticum aestivum
  Clone ID: uC-tsrow189012g01b1
cgttcgatttaacgcggcggcggcagcagcggcagggcaggatgtagataggagtatcaccaccaccgtgcaagaaatggcggtcgagactttcctcttcacctctgagtctgcgaacgagggccaccctgacaagctctgcgaccaggtctctgacgctgtgcttgacgcgtgcctcgcccaagacgctgacagcaaggttgcctgtgagacatgcaccaagaccaacatggtcatggtttttggtgagatcaccaccaaagccacggttgactatgagaagattgggcgtgacacctgccgcaacattggcttcatc

SEQ ID NO: 7074 - DNA, 265 bp, Triticum aestivum
  Clone ID: uC-tsrow189012g02b1
gtctattgccgggtcgaagaagctgatctacttcgggccgatggcggaggccccgccgttcgacctggaggacctgttgcgcgcgtcggcggaggtgctgggcaagggcgcgttcggcacggcgtacaaggcggtgatggagagcggcgcggcggtggccgtgaagcggctcaaggacgtggacctccccgagccggagttccgcgagcggatcgcggacatcggtgccgtgcagcacgagctggtggtgccccttcgagcctac

SEQ ID NO: 7075 - DNA, 360 bp, Triticum aestivum
  Clone ID: uC-tsrow189012g04b1
ctcacgtgtccgcccacgcgtccgtcacgcgtccggagcaaagcagttgaatatgataactttattgagtgttgccttacagtcaagggtctgactgagaagttcaaggagaaggacacagcttattccgggtctgcaactttcagttacgaggcattcatgttgactgtgctccctttcatcatcgcatgatgactccgcagttcaatacaaagactgagctttgagtgtgttgttccatgtgtcgaaacgtttttccatcggaggtgtagtttgtctgaattcgagtgatgtcgctgcgttcctgataaggtgataccctggagattggaaactgcctatggatggtttggaactctg

SEQ ID NO: 7076 - DNA, 433 bp, Triticum aestivum
  Clone ID: uC-tsrow189012g05b1
gtgcgctgccgtccgaatctctgcgcgaggcaggccggtcaaccgatccatccggccatggcgtgcaggggcttcttcgagtgcgtcctcaagctgctcaacctcgtcctcatggctgtcgggctggccatggcgggctacggcgcctacctgctcgtgctctggctccagctgctgcctccgtcgccgccggcgccgcctccaagcggcgacctagtgcaccttggccggccgatgcttcttcttattgacgtgtctatctcagatgggacctcggagaagctcatcagcgcatggtttatttttgcatttataggtgtcggtgttatacttttcattacctccatcttcggttgtgctggagcgtcagctaggagtggatgctgcttatccacttattcattcctcatcattttgttcatactagtagagc

SEQ ID NO: 7077 - DNA, 447 bp, Triticum aestivum
  Clone ID: uC-tsrow189012g06b1
gttccttttccttccggcgcctccaaaccctagcccgttgagccagccggaagaagcggcgagacattatgggatgggccgcgcggttcctgactgcggtctcattcctcgccttgggcgtcctcttcgcgccggacgcgctcttcggcggcgcccccggccgcccagccgccggcgtcgcggcggcgaggctggcccatgtactctgcttcgccaccgcatggggggccgcgctctgggtcaccttcatcggcggcatcgtcatgttcaagcatttgccaaggcaccagttcgggagtctgcaggggaagatgttcccagcatacttcatgttgatatcggtgtgttcagctatatcggttgcagcatttgcatacctcaacccatggaagacagcatcaactgttgagcgttaccagcttggtttccttcttgctgccctcggtt

SEQ ID NO: 7078 - DNA, 300 bp, Triticum aestivum
  Clone ID: uC-tsrow189012g07b1
tcgtttaccctagcgccgccgccgccagcaccaccgccgtacttgcaaaccgagagacagctgctatggccggcaagggcgagggtcccgccatcgggatcgatctcggcacgacctactcctgcgtcggcgtgtggcagcatgaccgagttgagatcatcgccaacgaccagggcaaccgcaccaccccctcctacgtcgccttcaccgactccgagaggctcatcggcgatgcggccaagaaccaggtcgccatgaacccggtcaacacggtcttcgatgcaaagcgtcttattggca

SEQ ID NO: 7079 - DNA, 330 bp, Triticum aestivum
  Clone ID: uC-tsrow189012g09b1
tcgttctggcttcctaactaactaaacagtgggcagagtgctcgctctccgtgaatgatgtccaggaagaggaggaagaagaagaagtgtggagcacgctgctgctacctggtcacgctctcagcagtgtgaattcccagaagcatgcttgccgtgccttcttccgggtgcaccggaggctggcatgtgagcagggatgcttcagtgatgcagaagaaaaaaggcaagtcttatcggcaagggaaggctacgcctttcttccaggtctccctctctccatctaaatctgtgtttggaggagggggctacggttagtttacccaccggttt

SEQ ID NO: 7080 - DNA, 271 bp, Triticum aestivum
  Clone ID: uC-tsrow189012g10b1
ttggtatcttgtccagagctttgcagtcaccggaggctctattggtacaaaatgccatcttatttctcaaagtcattggagcattcgatcagaatgaagagttcacagttctaggaaagcccctgtctatgcttccagttgagcctaacataggcaagatgctgatttgtggggctatatttaattgccttgatcccatattaaccatctgttgcatggacttatcggaagagatccattcatgacaccatttgacaagaaggatcttgcg

SEQ ID NO: 7081 - DNA, 421 bp, Triticum aestivum
  Clone ID: uC-tsrow189012g11b1
gttgcttgcagccccaccagccatacccaagctcattctttgtaagatgggtcttagcaaagttcctggctttcgatctacataacctgatccgcaagggcaagcaggactcgtgtgctagagcgcacgacggggccaaccacaatgctctcagtgtcgtaaactatggctcgcccctactgcacctcagtgctgctgatactggggatttgcagattggtctgcggaggatggtcaagagtttggacaatcaaagcttctctccgagctcagaagtcttgagttcaagcatggccactgtattccttttgacgccaaatcttgaccggtttactacccataggagacggggttcagacagaccccattgattcattatgtaaagcaacggaccaaacgattcagtgacctgatcaggata

SEQ ID NO: 7082 - DNA, 162 bp, Triticum aestivum
  Clone ID: uC-tsrow189012h03b1
ttttattcctgcccaacctcgagaagatgaagtgggacatggtcaattccttcatctgtttctgatgaaacaacatttctcctctctctagtacgtagcatgcatgctgctgcctatacaaaaccaccgcgtcgacgcatcaatctgtgcatgtacccaaaa

SEQ ID NO: 7083 - DNA, 249 bp, Triticum aestivum
  Clone ID: uC-tsrow189012h07b1
tcgataaccgagagcgcaaccgggacagcggggcaagatctgctgagccactggctacctcacaccggcgaccatggccgaggacctcatgggctgctacacccctcgccgcgccgacgaccagctcgacatccaggaggccgccaccgccggcctacggagcctggagctcctcgtctcctccctctccggcgcggcgccgtccaaggcgccgcagcagcacccgcagcagccgttcggcgagatcgc

SEQ ID NO: 7084 - DNA, 240 bp, Triticum aestivum
  Clone ID: uC-tsrow189012h09b1
tcgatcatcgcgtccgaatcactcgagcaaaaggaaggccatagtcaaatgttacctgatgttcttcctccttttggcaggtctcttgcccgaggcgcgcgcgaattcgtgccaccccggcgacctccgtgcgctgctggactttgccgggagcctcaatggtcgggatgtcctcctccgtgccacgtggtccggcgccgcatgctgcagctgggaaggcgtgggttgtgacgccgtcaa

SEQ ID NO: 7085 - DNA, 296 bp, Triticum aestivum
  Clone ID: uC-tsrow189012h10b1
ttgatgtaacgagctagctagccagcatttgggggggcacattttacatacatatccccttgctgggctagctaaaccgatctagaggatgtcgttggtgaggttcttcgacacgctggccctggactcgtggaaccccttcggcagcatcttcggcaccacggcgtccagcggcaccgacgcctggctggccagcgacacgacggcgttcgccgacacctacatcgagagccgggagacggcggaggcctacgtgttcagtgccaggctccccgcgggcgttaccaatgaggagg

SEQ ID NO: 7086 - DNA, 399 bp, Triticum aestivum
  Clone ID: uC-tsrow189012h11b1
tttgttcgattgcagttcatacatgctgatttaggcggtccaattgctgttaacagaatattcgcagaaaatgcatttgatgccgtcatgcacttcgctgccgtagcgtatgtgggtgagagcacgcttgagcctctgaggtactatcataacatcactgcaaacactttggttgtgctagaagccatggcgacgcacaatgttaaaaccctgatctactctagcacatgtgccacctacggggaacccgagaagatgcctatcactgaagaaactccccagtttcctataaacccatatggcaaggccaagaaaatggcagaggatatcattttggacttctccaagtcgaggaaatcagacatgtcggtgatgatcctgagatacttcaacgtcatc

SEQ ID NO: 7087 - DNA, 468 bp, Triticum aestivum
  Clone ID: uC-tsrow189013a01b1
gaaaaaaggccacggttttatgatgctcaggcgtgaattctttaatgcggttggttatcttaatcagaatgtcccagaagaaaggaaactgagattcatccactgggattttcataaatttgcgaaaagcaagtccgcaaatgtgctgggtgttttaggaggtgtggcgagtgaagcactggaccttactggattttactacagtgggaagccaaaagttcagaaaagaaggtctatccagcttagtcgaactagcactgcaagggatgttgaaataagagctagttctggagaccttccgagactctctagcaatgctgatgcacttggttctatagcttctcaggatatgagaaaagaggatagcaaacatgagcctcttggtgatgctccttgttatcaaactggagttcttcgtacgaattgcatagactgcctggatcgcacaaatgtcgcacagtatgctta

SEQ ID NO: 7088 - DNA, 401 bp, Triticum aestivum
  Clone ID: uC-tsrow189013a02b1
ttttgtacgcgtgggcggacgcgtgggcggacgcgtgggttctcccccaattccagatcgagatcccagggcattacaccaccgagctccacggattcccggtgccgcgcccggtgagcgcacgccgttccagatccgccccctgagttgcagggcctgatcgttgggcccttggagaaatcactcgaggttgcgggtctcggatgcggccatgagtttgccggggaagaaggccgcggccggggctgggggaatccggcggtggctctccaccgccgtgctgtcggcgctggcgctggtgctgatcctggtggtgatctcgctgtcggtgggctcgcccttgcccggggcgtcgctccctgaatacccagctgtcagagctagtcacccaaaggggaacg

SEQ ID NO: 7089 - DNA, 396 bp, Triticum aestivum
  Clone ID: uC-tsrow189013a04b1
ttgtgagccctcagacgttggtccgagctctaagggttgttgaaatgcaagagatcatagaccaacaagttgcagaggaagcagctgaggctgagggtgcaggcgccatggcgacaatagcaaaccaacgtagaacgacaaaaaaaggtgcaggggcagcatctaccccaagaaatagcacccaagagaaatcaaagacccagggaaagggctacaaggataaatgctatgagtgcatagggaaggctgttgaggctcgcttcgacaaattgctcactgagcttgttttctcagaagatatgatggaagctctggaggaagctaaggcaattggagaagagcttggcgatatctatgactatgttgcaccatgttttcctcctagatatgaaattt

SEQ ID NO: 7090 - DNA, 429 bp, Triticum aestivum
  Clone ID: uC-tsrow189013a05b1
ttgtgacgaggaaaaatacactgcagataagagagggaggggcgagcgagagaggcagggagaggcggcgcgccgagcaggccagcccacaccccgcccgcggccatggccggcgccgacctcaaccggagcttcattaaggacgtgaagcgcatcatcatcaaggtgggcactgcagttatcaccagaaatgatggaagactggctttgggcaggattggagccctgtgcgagcaggtgaaagatcttaatgctcaaggatatgaggtgattatggtcacctcaggcgctgttggtgtggggcgacagcggctcaggtaccggaagcttgtcaatagcagctttgctgatctgcaaaagccgcagatggagctggatgggaaggcatgcgctgctgttggtcagagtggtctgatggcactctatgac

SEQ ID NO: 7091 - DNA, 400 bp, Triticum aestivum
  Clone ID: uC-tsrow189013a07b1
ttgcacgaaaagcaccgacctttttttcagccgagacacgatgatccaccgccattagcagcggcgggggaagtggcgaccgatcttccgtggccagcgcgcgcgcgctcgctctcgccggatcgggccgggaaaatggcgcgcgcggtctccctgtcggcgctctgtctcctcctcgccgccgccgccgccggagctcgagtggacccgatttattctggcaaactggtgctggactggagcaaggaacccaagtttaaactgcagaatttctccctgaatcgagaggacaatcttcagctcctaagcaggtcacgagatgtcactcgcaggaaattgggggagaggaccggtgtaataaagatggaaacagtacagcaggatgatgaagccctagtta

SEQ ID NO: 7092 - DNA, 338 bp, Triticum aestivum
  Clone ID: uC-tsrow189013a08b1
tttctgtgcagtcttgatcaacccttggatgttccatacaggcctttttgtgctgaagccttctatggatggttttaagaacatgctacatgagctagctgatgggcgtgaaaacccagatggtgcagatcagggcttgcttgctagctatttgccagacttgcttgatcagccaatgttccatacaccaggtaatggcaccaaacttgatggaaattatcgccttcctctaggctatcagatggatgcatcttatttttatttgaagctccggtggagtattgcgtgtggaccgaatagtgtggatacatttccaagtgctccatggatgaagccat

SEQ ID NO: 7093 - DNA, 404 bp, Triticum aestivum
  Clone ID: uC-tsrow189013a09b1
ttgaaagataccagctataacaggatcaagagggtggtttccgaggagttgaagctgtatttccggcctgagttcttgaacagattggatgagatgattgtgttccggcagttgacaaagttggaggtgaaagagatcgctgatattatgctcaaggaggtgtttgataggctcaaggcaaaggaaatcgacctccaggtaacagagaagttccgggatagggttgttgatgaaggttacaacccgagctacggtgccaggcctctgcgacgcgccattatgaggcttttggaagacagtctggctgaaaagatgctggctggcgaggtcaaggaaggtgattctgctattgttgatgtggattcggatggtaaggtggtagttctcaacagcgggggtggtat

SEQ ID NO: 7094 - DNA, 350 bp, Triticum aestivum
  Clone ID: uC-tsrow189013a10b1
tttatcaacctgatctgatggaggagaccggggggtgtaacctcggcggatggctgcccccacccaacgggcaggacctcgccgcgcgggccgacgacctgacgctcacgcccaccctcctacgacggtatgtgcggcctcagcccaacacgggcgacctgcgccacgacgcccctgccggcgaagaacaggagcacgtccccatcatcgacctcggccggctgctcggtccgaacggcctcggctgcggacggggcgaggaggccaccaggctgcgctcggcctgcgaggactggggcttcttccagttggtgaaccacgggatacccgaggagaccctgggggagatg

SEQ ID NO: 7095 - DNA, 396 bp, Triticum aestivum
  Clone ID: uC-tsrow189013a11b1
tttcgatggcaagatcaggctctactccaggagcttgatgcggatggccaagacggtcttcccggggcttgggtcgccgatcacgcatgtggatgttacttatgacgggaagtggatcctgggcaccacagacacatacttggttttgatctgcaccatcttcaaggacaaggatggcaaggagaagaccgggttcagtgggcgtatgggaagcaggatcgccgcgccgaggttgctgaagctcagtccgcttgattcaatcttggctgggaatgacaacaaattccatggtggacaattttcatgggtaacggagaacgggaagcaagaaaagcatctctcgcgacagtcggcaagttcagcctcatatggaacttccaaaaggtgaaggacagc

SEQ ID NO: 7096 - DNA, 355 bp, Triticum aestivum
  Clone ID: uC-tsrow189013a12b1
tttgttccacacgagatttctgttctcgttgagctcatcttacgacacctgcgacaccacataaattacatggcccgccagccacacgcataatcctatttcacttgcaaaactttcgagtgcatgttgcaaatcgaatgcggctaccgggggattctctgttgcgccacttgtgaacgtgaggctgatacccggacacgccgtagccgccaaacacgacgggctcaaactcagccgctcacgtccacccgtgcgccgccgaatgccgaacacaaaaccccacccaccccacgcacgcaccgtgccggcgttggcgtcggcatccgcatgaagagctcggcggacaacgtggaca

SEQ ID NO: 7097 - DNA, 464 bp, Triticum aestivum
  Clone ID: uC-tsrow189013b01b1
ttttgtcgcgtgggagcagagcaccctcaaggcctggtccggcaagacggagaatgaggagaaggccagggcggcgttcctggtgaggtgcaaggccaactctgaggccaccctcgggacctacaagggcgacgccacccttgccgagggcgcctcggagagcctccatgtcaaggactacaagtactgatctgccccccgctggatggtttgggcattcctgcttactacctccgtctgaaaataagtgtctgacacttatttttggacggagtagtatctgtttggtttcatagtcttgatatttttaaatatcaatccttgtttttaataatataagcttctacttatagttaatttttgacgttgaatcccctgtaatacatttgctgagcagaatgtttttgctctaagcggcattgtattttttctgcttacaatgaaatgaaatggtgaaccccccc

SEQ ID NO: 7098 - DNA, 410 bp, Triticum aestivum
  Clone ID: uC-tsrow189013b02b1
ttattctttgttcctggccagaagaaggatctatatgtgaagagtgtccagcggactgttatctggatgggaaagaagcaagagtctgttgaggatgttccctgtggtaacaccgttgctttggttggtttggatcagttcatcaccaagaatgcaaccctgacaaacgagaaggaagttgatgcctgcccaatcagggcaatgaagttctctgtgtcccctgttgtacgtgttgctgttcagtgcaaggtggcttctgatcttcctaagcttgttgagggtttgaagcgtctggccaagtctgatcctatggttctctgtaccattgaagagtctggtgagcatatcatcgctggagccggagagcttcatcttgaaatctgcttgaaggatctgcaggatgacttcat

SEQ ID NO: 7099 - DNA, 336 bp, Triticum aestivum
  Clone ID: uC-tsrow189013b03b1
tgtataagaagaagaagaagaagaagaaggagagagagagttagagagagtgtgagagagagagagagagagagagagagaaggaaggaagaagatggcggacgaggggaccgccaactgcatcgacatcatcctcgccatcatcctgccgccgctcggcgtcttcttcaagttcgcctgcgggatcgagttctggatctgcttgctgctcaccttcttcggctacctccccggcatcatctacgccgtctgggtcatcaccaagtaggactgcatgcaggaggggctcctctgcctctgccgctaggtgatccatggcgaacttgttctgtgtct

SEQ ID NO: 7100 - DNA, 370 bp, Triticum aestivum
  Clone ID: uC-tsrow189013b04b1
ttgtctcggcgtgcttcgcggggccgcgcgccggggcggatctggcctcctggcctcttctgctgcgcggaggcgctgggcgctggggcggcggccccagactgcgacagcgtcgtcctcccctcctcctcgcagtggagtcgtggcggcgtgccggttggcggtggatgcgggcttcgtgcccggatccggcggggcgcaggccgtcggcgggatgcggcggcgctggccgtcctgggccccgcgggcggcagggcggacgcgcgtggtggtgggccggtggctcggggcggccgtgggtggatctggagctgcagcttccggcctccctagcttggcggagctgtttggcagagccggccctctggga

SEQ ID NO: 7101 - DNA, 386 bp, Triticum aestivum
  Clone ID: uC-tsrow189013b05b1
ttgacgcgtggtccccaccttcttccagcactcacgagtcacagcccaccagcgaagcccccaaccccgatcagcctcagcagcgatggcccccaaggcggagaagaagccggcggcgaagaagcccgcggaggaggagccgacgacggagaaggccgagaaggccccggcggcgaagaagcccaaggccgagaagcggctgccggcgggcaagaccgcctccaaggagggcggcgagaagaggggccgcaagaagggcaagaagagcgtcgagacctacaagatatacatcttcaaggttctcaagcaggtccaccccgacatcggcatctcctccaaggccatgtccatcatgaactccttcatcaacgacatcttcgagaagc

SEQ ID NO: 7102 - DNA, 422 bp, Triticum aestivum
  Clone ID: uC-tsrow189013b06b1
ttttagatcaccttctccgaggcatcaatctttggggacccttatggtcgtggcctgcgcgccctctccagggcccagattgactctgttcttgatcttgcacggtgcaccattgtgtccgagctctccaacaaggacttcgactcctatgtgctatctgagtcgagcctgttcatctactctcagaagattgtgatcaagacctgtgggactaccatgctcctgctcaccattcctaggattcttgagcttgctgaagagctgtgcatgccgcttgctgccgtgaagtactctcgtgggatgttcatcttccccggcgcacagcctgctccccacaggagcttctctgaggaggttgatgtcctgaaccgctacttcggccacctgaagtctggcggcaatgcttatgtgatcggagaccc

SEQ ID NO: 7103 - DNA, 321 bp, Triticum aestivum
  Clone ID: uC-tsrow189013b07b1
ttcaagaaagcaagcaggccgagcccagcgtccgcgggaggcacgcgcgcgcgcgcgcgctcaccaccggcggcggcggcatggacgtggccatggcgctggccacggtcttcttctgcctcctgctgctcgcctcggccgccatctcgctcctcctcctccgcctctgcctcgccgcgctccgccgcgcccccgcgcccgccccctacgccgccgtcgacccggaggccgccgcgcgggcggcgccaccgccagtgccgcagcaggaacccaaggcgccggagccccggcggctggcgtggcgggaggtggaggcgctga

SEQ ID NO: 7104 - DNA, 425 bp, Triticum aestivum
  Clone ID: uC-tsrow189013b08b1
tttgaatatggatttgtttctgccactcgtctgattgattttgattgccggaggacaatgtagccagcatgcttgttttgccgatgcggccaagatgcccctgacaaacatgcagacactcacggcgtattgggaggccgcgcttccaggaattcccattcccccggctatcagtgacctgttagcccaacaaaaagggcagcaaaaaattggaccgaactatgaaatagtcaactcagagggtggtcacggggacaaccatgttcatatcatatcacaggttaaagatgatttaaaagaggcatatgggtctcatggtgaagaaagtagaaagaatgtcatgatggcacttgagccaaaaattggtaaggatctgaagggacaaccattgtcacatgggttacaagctaaaaattatgtagaag

SEQ ID NO: 7105 - DNA, 390 bp, Triticum aestivum
  Clone ID: uC-tsrow189013b09b1
ttggacgcgtggggtgcccttcaggccctgatggtgggcatccagatcctcaccttggaggatgttgtctctgaggctgatatctttgtgaccaccaccggaaacaaggacatcatcatggttgaccacatgaggaagatgaagaacaacgccattgtctgcaacattggtcactttgacaacgagattgacatgaacggccttgagacctaccctggtgtcaagcgcatcaccatcaagccccagactgaccgctgggtcttccccgagaccaagaccggcatcattgttcttgctgagggtcgtctgatgaaccttggatgtgccactggccaccccagctttgtcatgtcctgctcattcactaaccaggttattgctcagcttgag

SEQ ID NO: 7106 - DNA, 377 bp, Triticum aestivum
  Clone ID: uC-tsrow189013b10b1
tcttcgactctcccgaaagaaagctcaggcctgggttttttcccacaccacccaccagtctcctcccgcctgaacccccattaactgctcggcaccggagaagagatcccccgtcctctgacgccagcggccatgtccgtcacgcgggttcttgcgctgctggcggcggcggcgctggtggtcgccgcgccggcgcgcgtgggcgcggcgggggcgtgcgcggcggagaggttctccaagaaccgcgtgtacgcggcctgcaccgacctgcccaccctgggcgcgtccgtgcactggacctacgacccggcggcgtcctccctgtccgtggcgttcgttgccgcgccgccctcgtctggcggctgggtcgcctgggg

SEQ ID NO: 7107 - DNA, 418 bp, Triticum aestivum
  Clone ID: uC-tsrow189013b11b1
ttgctactcagagtgggagccaagctagagcggccagatcccactcacccacccaatgcgcgcgcgcccctcgtgagctaccagagccgaccgacacactcaccagagcaccgccgaacggacgaacgccatggtgaaggcgaagctcctcgctgtgctggccctcgtggccgtcgccgcgccgttcctccgcgccgccggccaggaggagggtgagggcggggcgaggccgtcagagctgctgccgttcgcggtgggcgcggcgccggcggggtgcgacgtcgggcagggcgagtgggtgtacgacgaggcggcggcgccggcgtacgatgaggaggcgtgcccctacatcccggcggagctgacgtgccaggcgcacggccgccccgacaagtcgtaccaacactggcggtggcag

SEQ ID NO: 7108 - DNA, 424 bp, Triticum aestivum
  Clone ID: uC-tsrow189013b12b1
ttgagggcctcggccgccacgtcgtctcctcgggcgccgtgcaggccaactgggacaagaagctgcaagtggcatggaagaaggcgaggccggccccgacgacgccggaggaagccggccgcctcgtggtgctgacgctcaagaaccaccagaaggcggacgtcgacggcctcctcgccttctacggcctcccgcacccgaacgaggcgggatcggcgccaccgccggccgccggtcaccacgctcctccggcccagcacagcgcccccgcgcacaagccccagggcgtcaagttcgagctgcacacgctcccggtggacgccaaggcggtggccgacggcgacacggtgacggtgtacgtggacacgaatgacgcccccagcgagatcaagaaggccgcggcggagcgcaccaaggcgcgcgc

SEQ ID NO: 7109 - DNA, 327 bp, Triticum aestivum
  Clone ID: uC-tsrow189013c01b1
ttctatcgcgtccggcgctaccggtgccatctccgtttgagcatgtgcacgccgcggcgcccttcgacgagagcatgacgctcctcgatcctgagaccgacaagctgttctatgaggccttggccgcccatgaccatatggggatcggcacggttgtacgggaatgccgtgggctgttcaatggtctggagtcactcaccgactgctgtggtggtgatgggacgaccgcaagggccatcgtcaaggccttcccgcatatcaagtgcaatgtgttggaccttccaaaggtgatcgagaaagtcccaagtgatggtgttgttaactatg

SEQ ID NO: 7110 - DNA, 424 bp, Triticum aestivum
  Clone ID: uC-tsrow189013c03b1
ttcttctgccgagttacttgacaagtgccactgggtactagtgcaagtatggctcgggtctctgccaatgcagttgcacttgttgcactcgtctccgttcttctcacgtatggctgctgcgcccagtcgccgctcaattacaccggctccttggccaaatcctccaaggctagctggtcatggctccctgccaaggccacatggtacggcgcgcctaccggcgccggtcccgatgacaacggtggtgcttgcggctacaagcacactaaccagtacccgttcatgtccatgacttcctgcggcaacgagcccctgttcaaggacggcatgggctgcggcgcctgctaccagatacgatgcgtcaataacaaggcctgctccggcaagccggagacggtcatgatcaccgacatgaactactacc

SEQ ID NO: 7111 - DNA, 415 bp, Triticum aestivum
  Clone ID: uC-tsrow189013c04b1
ttctcgttcttctaagttctcagaggaatcaaccggtaccgtttcaaggatcgagcacgtataaactacgagcaagcatctctaaaatttgttgtctcgccgccatgatttcgaggtctcccagcctcttccagatcgacgacggagaggcccaggatcaggatcaggcggggacgccaacaatggcgaccgccggggagctcgtcgggctccggctgatcatacagccctcgccgaggcgacaacaacggccggcgctggccgtcctcaggaggtcttcggtgaggtccccggctgccgacctccaggagaacagcggctgccggccgttcgtgggccttgagttcttgaagtgctgcctctgctgctgcaagaagatcgacggcgacatggacgtcttcgtgtacaagggaga

SEQ ID NO: 7112 - DNA, 410 bp, Triticum aestivum
  Clone ID: uC-tsrow189013c05b1
ttattgaaggagagctcgcgcccctccccgccgccgccgcagccatgtctcagaagaagtcgcgcggcggagccgccgcccgagaagatgccgatgagctctcgcgctcgcccctccaggccgtcctcctcgccgacagcttcacgctcaagttccgccccatcaccctcgagcgccccaaggtgcttctgccgctggtgaacgtgcccatgatcgactacacgctgtcctggttggagaccgagggcgttgaggaggtcttcgtcttctgctgtgcgcacgcgcagcaggtcaaggagcacctggaggaggcgggctggactgggaagcccgcggcccgggagatggccgtcatggccgtcgagtcgcatgatgcgatcagcgcaggcgacgctctccgcgtcatgtat

SEQ ID NO: 7113 - DNA, 387 bp, Triticum aestivum
  Clone ID: uC-tsrow189013c06b1
ttcttaggtaaaggaaagattcgcccatggctccggcgcattccaagtctggcctcttcgtgggcatcaacaagggccacgtcgtcaccaagcgcgagctgccgccgcgcccgtccgaccgcaaggggaaaggtaccaagagggtgcatttcgtcaggaacttgatccgggaggtcgctgggtttgctccgtatgagaagcgtatcactgagcttctcaaggttggcaaggacaagcgtgccctgaaggtggcgaagcgaaagttgggtacccacaagagggcgaagaagaagagagaggagatgtccagtgtcctcaggaagatgagatctgctggaactggaacagacaagaagaaatagagcatcccaggctcatgaagttgat

SEQ ID NO: 7114 - DNA, 386 bp, Triticum aestivum
  Clone ID: uC-tsrow189013c07b1
tttgtcaagcaccaaccacacaagaaccgatcaagacaccagcaatggccggaggaggaagcgacgaagtgaagctgctgggcatgtgggcgagcccgttcgtccttcgagtcaagctcgcgctcagcctcaagggcgtcggctacgagtatgtcgaagaggacctcaagagcaagagcgagctgctcctcaagtccaaccccgtgctccagaaggtgccggtgctgatccacgacggcaagcccatctgcgagtcgtcggtcatcctgcaatacatcgacgaggctttcgccggcgtcggctcctcgctcctcccggaggaaccccacggccgcgccgttgctcgcttctgggcccgttacatcgacggcacgctcgtgaaagca

SEQ ID NO: 7115 - DNA, 407 bp, Triticum aestivum
  Clone ID: uC-tsrow189013c08b1
ttccacgcgtccgcggacgcgtgggccgttcggtgtttcagtgtcttgttccctctccccgatctcgactcctctaggggtcgtcctcgtgcactccgccgccgccagatcgaggtcggagctgggctttggagcagccatgggttcagacctcagagatgtatgtgttgttggggttgcacgcacccctatgggtagtttccttggtggcttgtcttccttgcctgctacgaaacttggctctatagcaattgaagctgctctgaaaagggcaaatgtcgatccatcccttgtgcaggaggtcttctttggcaatgtcttgagtgctaacttggggcaagcccctgcaagacaagctgctttaggtgcaggaataccaaatacggttgtttgcaccacagtcaaca

SEQ ID NO: 7116 - DNA, 427 bp, Triticum aestivum
  Clone ID: uC-tsrow189013c09b1
tctcacgcgtccgccacgcgtccgcggacgcgtgggcggacgcgtgggtcaatttgtaaacttgtttcgatctagcccgtgaagtccacatagctagttttcatgtagcccagaagcgtgctggttcacgttaagtaaagtttttctcctgtgttgtcaagacgtgtggcaggttgtgcggtgacgagtaaaaatatttcattatatgcgaatactatgaagaccagcgcggcctgtgcgacagaaatttccttgttgatgataggcgcttcagcatcaagctggatgagaccatcgaagtggatacagtaagtcacaacgacaaatcttttttcgtaattaagcatgacttatatatgcttcatttgcttcaacttataattttaaattttcactattctactagcgcatcctctgccatgcaaga

SEQ ID NO: 7117 - DNA, 325 bp, Triticum aestivum
  Clone ID: uC-tsrow189013c11b1
attgtccacgcgtccgcccacgcgtccgggccctcggcgtggaggtttctccctcggccgagtcccctcccctccccttcctcgccgatctccgccgccgccgccgccgccgccgaggggaagccatccatggctctccgccgcgccatcgggtccctcgccgtccgctcgcaggcatcatactgcctccgccgcgccgccgcctcgccccccaccctcacgcctcctgcgcccccgcctacgtccttccgccgcccggtcatcgtcccacgccgctccttcgccgccccgccccagcacgtcaagaaggtggccaagcacgacg

SEQ ID NO: 7118 - DNA, 403 bp, Triticum aestivum
  Clone ID: uC-tsrow189013c12b1
tttctttggctactgccatagttatgcaggaggcatccgttcctcagcagtctgttcaattctctgaacatgttaatatctgttctgatgaggtcaatgacgtgcctcctgaaattgatggaatattgttggacgaactgacaaagtttttggatgattctccgaaccacgacgtagtttttccagagaattctggtctccctccaatgtctgggcttgaggctcaagcttttgagataaatactgctgagctctatgaccaattggcaggacttacccagtcaggagatatgtctgctgtaaatttccctgctagcaatggcgatgttattgaaaacaatttgcagcaaacaaactctggacttgctatggatgatgattatatcagggctggatgatctgc

SEQ ID NO: 7119 - DNA, 337 bp, Triticum aestivum
  Clone ID: uC-tsrow189013d01b1
ttgtacatctttgatggacttcacatggagagggggggtttggaaccaaaacaactccagcttgctaaccagctgcaagagtcgctagtacataagaggtgcttaattgtcgttgatgatatatgggataaggaaacatggaccttgattgaaaatgtttttgaggatagtgctggaagtaaaatcatcaccacgactcgtaaccgcaaatttgccgaagaatttggtggcatctacgagatgaaaccactatgcacagatgactccagaaagttactccgcaccaaagctaaagttaaaggccatgatactgaatttgatatattgtcagataaaa

SEQ ID NO: 7120 - DNA, 369 bp, Triticum aestivum
  Clone ID: uC-tsrow189013d02b1
ttttagttgccaagaaggagaggcttctaaagagggcccaggctgaagctgaaggtaaaactgttgaggccaagaagccaatagttgtgaagtatggccttaaccatgttacctacctaatcgagcagagtaaagcccagctggttgtcatagctcatgatgttgatccgattgagctggttgtgtggctccctgctctttgcaggaaaatggaggtcccttactgcattgtcaagggaaaatctcgccttggatcgattgttcacaagaagactgcctctgttctgtgcctgaccacagtgaagaatgaggataagcttgagttcagcaagatccttgaggctattaaggcgaacttcaacgacaaat

SEQ ID NO: 7121 - DNA, 394 bp, Triticum aestivum
  Clone ID: uC-tsrow189013d03b1
ttcctacgcgtccgcccacgcgtccgcccgccgccgcctcctctcggttccttctccttcctcggagctccagccatgggtaaggagaagactcacatcaacatcgtggtcattggccatgtcgactctggcaagtcgacaaccactggccatctgatctacaagcttggaggtattgacaagcgtgtgatcgagaggtttgagaaggaagccgctgagatgaacaagaggtctttcaagtacgcctgggtgcttgacaagctgaaggccgagcgtgagaggggtatcaccattgatattgccctgtggaagttcgagaccaccaagtactactgcaccgacattgatgcccctggtcaccgtgacttcatcaagaacatgattactggtacct

SEQ ID NO: 7122 - DNA, 368 bp, Triticum aestivum
  Clone ID: uC-tsrow189013d04b1
ttttgacggcctgccctcggccagcgaagtcgtgcagctctaccagtccaacggcatcaccggcatgcgcatctacttcccggacgccgacgccctgcaggccctcagcggcagcaacatcgacctcatcatcgacgtggccaacgaggacctcgcctccctcgcctccgaccgcgccgccgccaccgcctgggtccagaccaacgtgcaggcccaccagggcctcaacatcaagtacatcgccgccggcaacgaggtgggcgaccagggcggcgacacggggaacatcctcccggccatgcagaacctcgacgccgcactctccgcggccgggctaggcggcatcaaggtgtccacgtcggtgtcgc

SEQ ID NO: 7123 - DNA, 407 bp, Triticum aestivum
  Clone ID: uC-tsrow189013d05b1
tgttcgtcggagcaaggaaaggcagggagagatggcaatgaggccgctcgtcgtcctggctctggccgtggcgctggccggggtggcgctgcgagggggcgccgcggagggggccggcgagtgcgggaggtcctcccccgaccggatggccctgcgcatggccccgtgcatctcggcggcggacgagccggactcggcgccctccagcagctgctgctcggcggtgcacaccctagggaagagccccagctgcctgtgcgccgtcatgctgtccggcaccgccaagatggccgggatcaagcccgaggtggccatcaccatccccaagcgctgcaacatggccgaccgccccgtcggctacaagtgcggagattacacgctgccttgatggcccagctctggtgctg

SEQ ID NO: 7124 - DNA, 145 bp, Triticum aestivum
  Clone ID: uC-tsrow189013d08b1
gtcgcccacgcgtccgccggcgaaccaagtggctagcaagcaagccacgtcctcctcgaccaagaagctccgtcgtcgtcgctaggaacaatcgatggctgctgcggctgctggtggtggtgctggtggtggtgttgcgggggtg

SEQ ID NO: 7125 - DNA, 354 bp, Triticum aestivum
  Clone ID: uC-tsrow189013d09b1
tgtccacgcgtccgacgcgtccggagagagtagagagcgagggcgagggtagcgcggcaacaacaatacgctaggttgatctggagacctcacgtgtgctcatcctgctgtacgagcagacgatgcgcgcgatccgtgccgggcgactcacacagggcggcagagatgaccaggaagcggcgagttgctcggaagtgaagcgctaaaaggagggctcgaaagcaggggagactcggagacgagcactttgaaacaggtggctcaaagaactgtcgtgggctcgtggcatggttgctgcggatataaggcagcggaaataacccggccgcaggtggtggtgccaggggaggagag

SEQ ID NO: 7126 - DNA, 458 bp, Triticum aestivum
  Clone ID: uC-tsrow189013d11b1
tggctttggctactgccatagttatgcaggaaccatccgctcctcagcagtctgttcaattttctgaacatgttaatatctgttctgatgaggtcaatgacgtgcctcctgaaattgatggaatattgttggacgaactgacaaagtttttggatgattctccgaaccacgacgtagtttttccagagaattctggtctccctccaatgtctgggcttgaggctcaagcttttgagataaatactgctgagctctatgaccaattggcaggacttacccagtcaggagatatgtctgctgtaaatttccctgctagcaatggcgatgttattgaaaacaatttgcagcaaacaaactctggacttgctatggatgatgattatatagggctggatgatctgcttgctcctggggaaaccttctcctatgatttttctggtgaaacctttttctatgat

SEQ ID NO: 7127 - DNA, 388 bp, Triticum aestivum
  Clone ID: uC-tsrow189013d12b1
ttgtactactacaacagcaacccttattatgtgccaactgtcccaacacatgatgcaatcactactactgagaccataaaccctgaagtagatttgtgggatgatggctccaactaccatgttatctgtgatcttccagaagttgctaaacataatctacatttacactgcactaaccaaaaattgattatttttgccgaaatcgaatcaaccaatgagtacaatcccatcacaaaccgcattcgcgaaagaagacacaaaagatatcgcagaagagtccgtcttccttcccaagttgacgaaacgaaaattgatgcaaaattggaaggtggggttttgaaggttgttttgccaaaaactaaggaacatcagggtgaaaataaacaaa

SEQ ID NO: 7128 - DNA, 357 bp, Triticum aestivum
  Clone ID: uC-tsrow189013e01b1
tttcttacgcgtccggtcgaccaccagcagcagcacacctccacaccgaggccaagcgaagatgtcgggccgcggcaagggagggaaggggctgggcaagggcggcgccaagcgccaccggaaggtgctccgggacaacatccagggcatcaccaagccggccatccggcggctggcccgccgtggcggcgtgaagcgcatctcggggctcatctacgaggagacccgcggcgtgctcaagatcttcctcgagaacgtcatccgcgacgccgtcacctacaccgagcacgcccgccgcaagaccgtcaccgccatggacgtcgtctacgcgctcaagcgccagggacgcaccctcta

SEQ ID NO: 7129 - DNA, 395 bp, Triticum aestivum
  Clone ID: uC-tsrow189013e02b1
ttttagagcactaacccagtacttcgggctcggttccgagactcgccacaccgccacatgggttcctgatccttatggaattgagaccggcaaccaagagaaggcccctgaaggctatgaggagaaatggctgctcaatattcatgccatcgacacgaggggcgtggccgacaagcctagctgcaccgagtgcaagtgcgacttctacaatgtcacaattgatgagtatgggcgcacagtctcgaagaactacactggtgggttgctttgctgctatgatcagacccagtgtcggctcaaagcagggttcaacgccgaggtgcggaaggtgttcttgcagtacaccgtgacttggctcgactggactgatgcggtggtgcctgtcaagatctaca

SEQ ID NO: 7130 - DNA, 380 bp, Triticum aestivum
  Clone ID: uC-tsrow189013e03b1
tttcctaccaagcttagccacaaaccagtaagagcaatggcgccctccaagcttgctcttttcctcgccctgaacctggtcctcctcgccaccgtgcagggctgcggaccctactgcccaccggtagtccctaccccgccgatccgctcaccgccaatcgtgccaccgaccggcgggggcagctgcccgatcaacacgctgaagctgggtgtgtgcgccaatgtgttgaacctgctgaagctcaagatcggcgtgccggcgaacgaggagtgttgcccgctcctgggcgggctcgccgacctcgacgccgcggtgtgcctctgcaccgccatcagggccaacattctcggcatcaagctcaacgtgcccatcgacctgac

SEQ ID NO: 7131 - DNA, 408 bp, Triticum aestivum
  Clone ID: uC-tsrow189013e04b1
ttctacgcgtccgagcgcgcgtgggcgcactggaggcggctggggtccccgaggctggtggtggcgcccatggtggacaactcggagctacccttccgcatgctgtgccgccgctacggcgccgacgccgcctacacgcccatgctccactcccgcatcttctccgagaacgagaagcacagggacatggagttcactacctgcaaggaggaccgcccactttttgttcagttttgtgcaaatgatcctgacattttgttacaagctgcaaagctggttgaagcacactgcgactatgttgatttgaattttggatgtccacagcgcattgctaaacggggatactatggggcatttctcatggacaaccttccactcgttaaatcgcttgtgcaaaatctgtcagag

SEQ ID NO: 7132 - DNA, 429 bp, Triticum aestivum
  Clone ID: uC-tsrow189013e05b1
tttatcgccggagaggaatcgcgacgagggcttgctcctatcagttaaatcaaagccatggagcacaaggagaccggctgccagtctcgggagggccccatcctttgcgtcaataattgtggcttcttcggcagcgcggcgaccatgaacatgtgctccaagtgccacaaggagatggcgatgaagcaggagcaggcaaagctggccgcctcctctttcgacagcatcgtcaacggtggcgatgccgcgaaagaacatcttgctgctggcagcacggcggtggcagttgctcacgttgaggcgaagacgcttattaccgcacagcctgctgatatcgctggtccaagcgagggggcgatggagaaccccaaaggcccaagccggtgcagcacctgcagaaagagggtcgggctgaccggattcaactgc

SEQ ID NO: 7133 - DNA, 377 bp, Triticum aestivum
  Clone ID: uC-tsrow189013e09b1
tggtttttttgctattgaaacagtactggggggcgctttttgcagagaactcaccaccctttacaactgctatgattattttggcatcagttatatcttcaactgtgtccaatgttttgttaggggagaaggcagcttttattgtcccgacagcttccactctatcttattctaggcatgctttgtggggtagtgagtgtggtattcaggcaactggttgtttggttcacaaagactttcgacttgataaggaaaaaatttggtctccctgctgtagtatgtccggctttaggtggtcttggagcaggtttaatagctctaagataccctggaatactgtattggggtttcaccaatgtagatgaaattctacatac

SEQ ID NO: 7134 - DNA, 446 bp, Triticum aestivum
  Clone ID: uC-tsrow189013e10b1
ttccgagaggccaaagagaaaaaagctcactggatcgtttcagccccgccgcacccccacacccgccgacgacgcgatgattcccaacctctccgccctcgagaaccacttcggcgccgccgccgccggcagcgacgacctcggcggcctcttctccgccgacgccgctggccagctcgccctcgagttccccacctgcaacgacttcgatgggttccagaaggcgaccaaggagatggtgaacaacaagaaggggaccaccacgctctccttcatcttcgacaagggcgtcatcgtcgccgccgactcccgggccagcatgggcggctacatatcctcgcaaactgtgaggaaaatcatcgagattaatccctacatgctgggaaccatggctggaggtgctgctgattgtcagttttggcatagaaacttgggggtcaagtgcc

SEQ ID NO: 7135 - DNA, 444 bp, Triticum aestivum
  Clone ID: uC-tsrow189013e11b1
tgtggacgcgtgggttcaccaatatgttcccctgctttatttggacatccaaacattctgcaaagtctaatgtaatacagtgcaccatacccaacctccatgccagccttattatttgcatctatgtaatgaataagttgcagtatttatttatctcaagggaaaatggcattgcaaagatttttgctaccttctctcttgatctcagaagtaccatgtagtattgggcagcttcaaagctacaaagttttagtatatttgtgccacagaatatcgaaagccatacagttttggtctgtgtagtctcataaagagatccatttacgtgttcaatgcctaacacattccgtcttgtttgaatgtttgtactattcttataacccaatgaaagttgcatttttcccatcatgtcagctagaagggaaaatttattggtagtttgaa

SEQ ID NO: 7136 - DNA, 429 bp, Triticum aestivum
  Clone ID: uC-tsrow189013e12b1
ttaggggattcatgctcctgggaggtgctcgggggggattgattgtgccgtcccaaaaggagactcgctcagagagccatacactgctggtcaccacatcctcttagctcatgctgaggctgttgagctgttcaaagcttgttacaacaagcatggggattccaagatagggatggcctttgatgtaatgggttacgagccattccaagactccttcctcgacgaccaggcccgggaaagatccatcgactacaacctcggatggttcctggagccagtggttcgtggtgactaccccttctccatgagatcgctgatcggagatcgtctacccaagttcactaaggaggagcaagagaagctagcgtcctcatgtgacatcatggggcttaactattacacctccagattctccaagcatattgatat

SEQ ID NO: 7137 - DNA, 343 bp, Triticum aestivum
  Clone ID: uC-tsrow189013f02b1
ttgttcccttcccgcgcctccgctcccaccgccgcctcgccgtcgccggggaggcccccgtcgaggcgccgcccaagcccgcggaggcggatccctcccccgccgcgtccaacgggtccgcggcagccgcacccgccgctgccgctcccgctgctccggtcgccgcggccaaggccgaggcggtggcgtcgcccaagttccaggactcgaggtgggtcaacgggacctgggacctcagccggttcggcaacaccggcggcgccgtcgactgggacgccgtcatagacgccgaggccaggaggaggaaatggctggaagattccccggaggcaagtagcagcga

SEQ ID NO: 7138 - DNA, 216 bp, Triticum aestivum
  Clone ID: uC-tsrow189013f03b1
tatagattctgccctgttaaaaaaaaaaaaaaaaaaatttataaaaaaaaaaaaaaaaaaaaaaaaaaaaaaaaaaaaaaaaaaaaaaaaaaaaaaaaaaaaaaaaaaaataaaccggggggccgcccttttggaggcccctttttttcccccccctgcctgcatcttatttttttttttttggggcccccttaatttaatttgctggccgttttt

SEQ ID NO: 7139 - DNA, 380 bp, Triticum aestivum
  Clone ID: uC-tsrow189013f04b1
ggatccgaaacagtacaggagcactcaatatctttagaattacaagacaagctaatctgcaacgagtatcaaattcaatcttcaacatccgtgaacatccggtgattcttactcctaccaggctacatattctaccaaaaccatggaatcccatctcaaatcccagtttccttcatatgtcacttgaacagcaccatgtatgatattgcaagaaaaccttgtgcgggacatgctctaggagcagacaggaaacttatctcgaaagttgctacatcagtcgatcttcacagaagcatagatcttcctcacaaaccagaagcaagcatagaagccaatggtgccggtcaggacgaagaaggcataagaaatgatcagcatgt

SEQ ID NO: 7140 - DNA, 372 bp, Triticum aestivum
  Clone ID: uC-tsrow189013f05b1
ttgtcgcgtgggcggacgcgtgggcggacgcgtgggcggacgcgtgggcaaatcacaccaaccccccaaaacctccccgcatctcgcgcctctccgccgccgccgccgccgccgaggacaccgagcttctcccccgcccgatcgccatggccgccccgacggccttcgccgccgccaggttcctcccctccgcccacctcgactcctccgcgcgactcgccccgctcgccgcgattcgccccagcctttggagggaagaccggtcctgcctagagtggcttcgtggcagggagccccgttctgtggtgtacgtcaacttcgggagcatcactaccatgaccggccaagagctggtggagttcgcttgggggt

SEQ ID NO: 7141 - DNA, 423 bp, Triticum aestivum
  Clone ID: uC-tsrow189013f06b1
ttgttgcagaccactccctccatccacctcttgaggtccttgtagcagcagagaagagcagaggagagcaagaaagcagagatggggttcaggaagggcctgctggcgtgcttcggcccgggcggcggcggcgacgaggaggagacggagcaggaggcgcgggcgacgccgggggcgcggcggcggcgcacggtgatgaacctgcggtcgctgtcgctggaggacctgtcgcggacgctggccaccaccagcctgcacgccttcaccctggacgagctcaagtccgtgaccaagaacttctccaccgccaacttcctcggcgagggcggcttcggccccgtctacaagggctgcgtcggcggcgccctccgccccggcctcgccgcgcagcaggtcgccgtcaagtacctggacctcgacagc

SEQ ID NO: 7142 - DNA, 304 bp, Triticum aestivum
  Clone ID: uC-tsrow189013f07b1
ttcccacgcgtccgatctcttgcatctgtcacactgcacaaaagcaaaaccactcttcaagagtagctaaaaggacaaatcggcaagaggttgtgtgagatttggtgcaaatcgcaagatggttaagcaaaagattgtcctcaagttagctctggacgacgagaggaagaggaggaaggccttcaaggccgccgttggcatgtcgggcgtgacatccgcaacgatggagggggacaagatcatcatcgtcggggacggcgtcgacccgatcacgctgaccacgatgctccggcgcagcctgggc

SEQ ID NO: 7143 - DNA, 373 bp, Triticum aestivum
  Clone ID: uC-tsrow189013f08b1
ttttccacgcgtccggagagacggtggtgacggcgagggaatgaacatggccggcaaccggacggtgcgggagccgagggtggtcgtccagaccatgagcgacatcgacatcctcgacgacgggtaccggtggaggaagtacgggcagaaggtggtgaagggcaacccgaacccgcggagctattacaagtgcaccacggtggggtgccccgtgcggaagcacgtggagcgcgcgtcccacgacctgcgcgcggtgatcaccacgtacgagggcaagcacaaccacgacgtgccggtcgccagggggagcgccgtgctctactcgcccgcgccacgggcggcggacagcaccgggagcaccggccactacctg

SEQ ID NO: 7144 - DNA, 383 bp, Triticum aestivum
  Clone ID: uC-tsrow189013f09b1
ttgttgaaaccagaataggtaccaacattgagaatactgatgtcccttcagtttcgcagcctgatatactgatgcaaggtgctctagatgtgtctggtcttcagtataacccgccatcagtttcggatcatgtgtatccgaacacaacacagccaagtataatggagagccaacaaggaaacgctcaagcacaacatctttcccatttttcaagcttgctggcacagcaagctaacactctgcaaagcaacttcttggggtcaaatcttacccagcaccgggattttgacttttcaccatttttatcagcacagtcagctatgaaatataacccagctgtgccaactaccagttacccaatctccatgcaggagaatttaaac

SEQ ID NO: 7145 - DNA, 360 bp, Triticum aestivum
  Clone ID: uC-tsrow189013f10b1
atcgtggacgcgtgggcggccgcccacggtctggggcgatttaaacgcaccgcttgcttgtgtccgaactaagccccaatcccgtcaccaccgccgctggtgctcggcgcgatggcgcagaaggacgccgccaatggcaacggcgccaccacgcgcccgccgcccactccctcccccatccgcttctccaagttcttccaggccaacatgcggatcctgggcaccggcggagctggcttcatcggctcgcacctcgtcgacaagctcatggagaacgagaagaacgagggcattgttgctgacaactttttcactggggcaaaagacaacctgaagaagtggatcggacacccaagattt

SEQ ID NO: 7146 - DNA, 416 bp, Triticum aestivum
  Clone ID: uC-tsrow189013f11b1
tttggacgcgtgggtcgtgctgctgtccagcatccggcaccggcatgtggtgtcgctaatcgggtactgcaacgagcaggcggagatgatacttgtgtacgagtacatgcagagaggctcgctgcgacaacacctgtacggctccggcgagccggcactgccggcactgtcgtggaagcagcggctggagatctgcatcggggtggcgatgggcgtgcactacctgcacgcaggctgctcggagaacatcatccaccgcgacatcaagtcgaccaacatcctcctgggcgacagcaaccgcggcatgatagccaaggtagccgacttcgggctgtcgctcaccgggccgtcgttcgggcacacgcacgtgagcacgattgtgaaggggagcttcgggtacctggacccggagtact

SEQ ID NO: 7147 - DNA, 429 bp, Triticum aestivum
  Clone ID: uC-tsrow189013f12b1
tctcccgccgccgcgcccaaacccaacccgcgggcgccattgacgtcgccgccggatcgcgcggaggcgaccaccccaccgccgccaagatgcagatcttcgtgaagaccctgacgggcaagaccatcacgctggaggtggagtcctcggacaccatcgacaacgtgaaggccaagatccaggacaaggaggggatcccgccggaccagcagcgcctcatcttcgccggcaagcagctcgaggacggccgcaccctcgccgactacaacatccagaaggagtccacccttcacctggtgctccgcctccgtggtggcgccaagaagcgcaagaagaagacgtacaccaagcccaagaagcaaaagcacaagcacaagaaggtgaagctcgccgtcctccagttctacaaggtcgacgacgccaccggca

SEQ ID NO: 7148 - DNA, 353 bp, Triticum aestivum
  Clone ID: uC-tsrow189013g01b1
tttctctacccctacaggaggccaacaagggccaacatcctattggcgatgcggtggctggtgcatgggtgcagctccggggactcccttgtgttccacttctccggccacggtgatcaggagaaagacaaggacggcgacgagcaggacggccaggacgagagcatctgcccgctggactggcagctgaacggcgccatcctggacgacgagatcaacgaggccatcgttcgcccgctcgtgcagggcgtcaggctccacgccatcattgacgcctgccgcagcggcaccgtccttgatctccccaacctctgccagatcaaaaagaacgggaaacccctgtggattgatca

SEQ ID NO: 7149 - DNA, 339 bp, Triticum aestivum
  Clone ID: uC-tsrow189013g02b1
ttgtttacgcgtccgcccacgcgtccgcccacgcgtgcgcccacgcgtccgggaacttctagaaggaggcggcgagggcgagcagggagcggaagagatggagaacggcggcagcaaaggcgacgtcccggaggacgccaacgcccattgccctggaacgcagtcggaggaggcagggaaggccgattcctgcgccgggtgcccgaaccagcagatttgcgccaccgcccccaagggccccgatcctgacttggttgctattgctgagcggatggctactgtgaaacacaagatactggttttgtcaggaaagggaggtgttggaaagagcacattttc

SEQ ID NO: 7150 - DNA, 354 bp, Triticum aestivum
  Clone ID: uC-tsrow189013g03b1
ttgtcctccccgtcccctgtcgtcggcctgcggggcgtggtgagctccctcgtcgccttcttcatcgtcgtcagcaccgtctccctgctcttcgaccgcggccacgagtcgcaggtgcagctggcggtgcagcaccggcaccaggaggtgaaggtggccgcggccgggagccgcgaggcgcaggtgcagtggacggacgagctcatgggcgaggccgcgaggggctccggcgaggagtgcaactggtccgtggggcggtgggtgtacgacaacgcctcccagccgctctactccggcctcaactgctccttcatcttcgacgaggtcgcctgcgagaagtatggccggaatgac

SEQ ID NO: 7151 - DNA, 407 bp, Triticum aestivum
  Clone ID: uC-tsrow189013g04b1
ttcttaaatcatgttcgagacattcaatgccccagggatgtatgtggctattcaagctgttctttctctatatgccagtggtcgtactacaggtattgtgcttgattctggtgatggtgtgagccatactgtgccgatttatgagggatatgcacttcctcatgctattctccggctggatcttgcgggccgtgatctgaccgactccctgatgaagatcctcacggagaggggctattccttcaccacaactgctgagcgggaaatcgtaagagatataaaggagaagctcgcctacgtcgcccttgactacgagcaggagctggagaccgccaagagcagctcgtccgtcgagaagagctacgaactgcctgacgggcaggtcatcacgatcggcgccgagaggt

SEQ ID NO: 7152 - DNA, 389 bp, Triticum aestivum
  Clone ID: uC-tsrow189013g05b1
ttgttgtcttgcaatgtttgcactggccatagtcatggccgtggtggctgacgtctcggcgcagaacaccccgcaggacttcgtcaacctgcacaaccgcgcccgcgccgtggacggcgtcggccccgtggcatgggacaacaacgtggccaggtttgcgcaggactgggcggcgcagcgcgccggcgattgccggctgcagcactccggcgggccgttcggcgagaacatcttctggggttccgggcagtcgtggacggccgccgacgcggtgaagctgtgggtggacgagaagcagaactaccatcttgacagcaacacctgcgacgccggcaaggtgtgcgggcactacacgcaggtggtgtggcgcaggtcgacccgcatcggct

SEQ ID NO: 7153 - DNA, 357 bp, Triticum aestivum
  Clone ID: uC-tsrow189013g06b1
tttttacagcccgggtggttgactacccactgagcagagcatctttcggggcgcgatccaggaagccaggaacggcaaagcaggcggcgcggcggcggctccatcgtgacgacaagaaatggccaccgccctccgccctccccggctcccagttccagagcaagcctcttcacttcatcgcctaccaaagtacagagttgccgtcactgggcgtaggagcttcgccgccagggccggctcgtatccaggcaacgtgggcgtcccgaagcaatggtacaacctcatcgccgacctgccggtgaagccgccgccgatgctgcacccggggacgcaccagccgctgaaccccagcgacct

SEQ ID NO: 7154 - DNA, 381 bp, Triticum aestivum
  Clone ID: uC-tsrow189013g07b1
ttcgcctttctagctaaagctaagctaccttgaggaaatggccgcggcgactggcatgatcatgctggcggcgactggcatgatcatgctggcggcgctggcgatcctcactccgtccgcccgagggctcgaccgcgccgatttcccgccggtgttcctcttcggcgtcgcgacgtctgcttaccagatcgagggcgcgtacctggaggacggcaagggcctcagcaactgggatgtgttcacccacacacctagaagaattaaggatggacggaatggggacatagcggatgatcactaccatcgttacatggaggacgtggagattatacatagtttgggggtcgactcctacaggttctcaatctcatgggcgagaat

SEQ ID NO: 7155 - DNA, 339 bp, Triticum aestivum
  Clone ID: uC-tsrow189013g08b1
tgggattccaaaacagcattatgtggtactctcctgctacttatggcactgctgcctcttccagccagcgcgtcgagcaaactctacatcgtgtatatgggggagaagaagcatgatgacccgtccgtggtcaccgcgtcacaccatgacatactaacatctgtttttgggagcaaggatgaagccttgaggtccatagtttacagttacaagcatggattttctgggttcgcagcgatgctcaccaagtctcaagctgacgcaattgcaaaatttcccgaagttgtcactgtgaagcctaacacttttcatgaaacacacacaactcggagctgggac

SEQ ID NO: 7156 - DNA, 335 bp, Triticum aestivum
  Clone ID: uC-tsrow189013g10b1
actgtccacgcgtccggctgcgactcccgctcgccgccgtcggccaccggcgacgagcctccgtctccgcctcctctcgcctagcatcctctcccaaaccccaagctaggagccctccgccgctctcccctcccaaacccctcctcgcacccgcccagatccaagcgcccatcttcccctacgccgccgccgccgccgccgccgggccgaccaagagggggagcgatggctccctattaatctccatttccccttcctccatcccctccgccgctctcccctcccaaacccctcctcgcacccgcccagatccaagctcccatcttcccctacgc

SEQ ID NO: 7157 - DNA, 411 bp, Triticum aestivum
  Clone ID: uC-tsrow189013g11b1
tcttgccgactgttccgtttatttaaccgagccgtcccattcttggagagcaagaagcacgccaccacctcgcccaaagaatccccacccccgccgaccccctcccctcccctccccggccgaagacagatccggcgaccgacaagccatggtgtccaacggggagctgtcgcagccgcaggcgggggagtacggcctcgccgtgatgcgccgccggcccaagaccaagatcgtctgcacgctcggcccggcctcgcgctccgtcgacatgatcgaaaagctgctgcgcgccggcatgtgcgtcgcccgcttcaacttctcccacggctcccacgactaccaccaggagacgctcgacaacctgcacgccgtcatggagcgcaccgggatcctctgcgccgtcatgctcga

SEQ ID NO: 7158 - DNA, 250 bp, Triticum aestivum
  Clone ID: uC-tsrow189013h01b1
ttcttgacccccgcactcaacctcgccggaggctgcgatccgatgtacggcaacggcaacgtcttcagctccgacatcacgacgtgccagtccaacggcgttgaggtgctcctctctctcggcggtggcgccggcagctacggactatcctccaccgaggacgcgcagagcgttgccacctacctgtgggacaacttcctcgggggcagcgcgtcgcaccgcccgctcggcgacgccgccctggacggca

SEQ ID NO: 7159 - DNA, 363 bp, Triticum aestivum
  Clone ID: uC-tsrow189013h02b1
ttgttaccggtgcggcgagccgcgtggccgggggctctgaggccactttcgccaaagccggtatcgccgccgatacggccaattatgtggtggaacgtgttggcagcttcacgctgtacaacccgaagtcgacgcgtcgttggggcggcggttccaccaatctgtgcggcggatcgcgcgcgattcagtccaaagcgccgagcggtttgggtttctaccgcgaagtcgacttcaccgctccggccggttacgtcgagttccgcggctaagcgttgcgctgaacagtgctcaacaactgccgcagccgaaggcaaatcccagagcgccaacggccaaaccgccggcgcagtaaacagcggcgaa

SEQ ID NO: 7160 - DNA, 377 bp, Triticum aestivum
  Clone ID: uC-tsrow189013h03b1
ttattccgagaaccccccgctccaaagccctggccctagccatctcctctccccccagccctcgtcgagcgcgcgttttccaggagcttcaggtgccggcggcgccatggcttcggagaccgagaccttcgccttccaggccgagatcaaccagctgctctcgctcatcatcaacaccttctactccaacaaggagatcttcctccgcgagctcatctccaacgcctccgatgcgttggataagatcaggtttgagagcctgactgacaagagcaagctggatgctcagccagagctgtttatccatattatccctgacaaggccacgaacacactcactcttatcgacagtggtattggtatgacaaagtcagacc

SEQ ID NO: 7161 - DNA, 328 bp, Triticum aestivum
  Clone ID: uC-tsrow189013h04b1
ttgttacgcggccgcgcaacgcatgcatgcatgcggggatctatcatgcttacgacgacaaacggacgggctttacgttttcttgttcccactttttggtttgttccaaccaaccaggctatgttcaagctcttttagcgacaggtttggagtttgcttcgggttaattagatcatggaaaccttggttgttgaccttctagctatgtacgtgtctcgatcgatctgggggtagtagctagctagcttgttgcgcaagaactgatacatgcatgcatgcacagatgggcatgagtttgctggcatgatggctggcaagctatatggtg

SEQ ID NO: 7162 - DNA, 426 bp, Triticum aestivum
  Clone ID: uC-tsrow189013h05b1
ttttcacgcgtccgcccacgcgtccgcccacgcgttcgcccacgcgtccgcggacgcgtggcttgcttccaaacgcgacctcatcagagcaagacccggaggaaacaaggagaggccagagcggcctgtcacaaggcaaaggacagaggaggtgcttgttcaggtctcctgctagatccggaggcgatgggcaggggcgtgctggaggtgcatctcgtcgacgccaagggcctcttcggcagcgatttcctagggaagatcgacccgtatgtaatcgtgcaataccggagccaggagcgcaagagcagcacctccagagatgaggggaggaacccgagctggaacgaggtgttccggttccagatcaactcctctgcggccaacgggcagcacaagctcttcctccggatcatggaccacgacaac

SEQ ID NO: 7163 - DNA, 360 bp, Triticum aestivum
  Clone ID: uC-tsrow189013h06b1
tgttaactttcttggtgtcagaaatgctgctcggaggatgctcctcgatgagctgggcatcccagctgaagatgtgcccgttgaccagttcacccctctcggtcggatgctttacaaggcaccatctgatgggaaatggggcgaacatgagctggactacctgctgttcatcgtgcgcgaggtgaagctggtcccgaacccggacgaagtggccgacgtgaagtacgtgagccgggagcagctgcgggagctcatccagcaggcggacgccggcgagggcggcgtgaagctgtccccttggttcaggctggtggtggacaactctctcatgggctggtgggagcacttggagaaaggcac

SEQ ID NO: 7164 - DNA, 387 bp, Triticum aestivum
  Clone ID: uC-tsrow189013h07b1
tgtaagaattagatgaaacaagcactttggttaaagacaaagaatctgaagctgctgtacttcatgacaacgtcggatccttggaggatgaggtgaccaggctcaaggaagaaattgacgtgacaagtgaacgtcttgatgctgcagagaaagatgcagccgacctaattgcagagatcgaagagctaaggttgaagctacaggcagtagaagatgagaaagcagaggcgctgaacaatgaccagcttgcaagttcagaaatcgcggccctgactgaacaaaagaacgagctagccaaggagctagaagctagcaaagatgaagttgagaaggttaagaaggcaatggagggtctggcctctgccttgcacgagatgtcagctgaat

SEQ ID NO: 7165 - DNA, 361 bp, Triticum aestivum
  Clone ID: uC-tsrow189013h11b1
tcgggaaccttctgctcgccatggtcggcgaggtcggggagctgtcggagctgttcatgtggaaaggcgaggtgcagaagggcttgcctggctgggaggagagggagaaggagcacctcggcgaggagctctccgacgtgctgctctacctgatccgtctctccgacatgtgcggcgtcgacctcggtgacgcggccctgaagaagatcgtgaagaacgccgtcaagtacccggcgccgtcaaagagcgcctgatgagcgaacgcctaatatgatctgcggagggattgtctacttttttgcagtttgagaacgtgaagttccggcaaacttgtggtcggttgggtcaagttaaattgtga

SEQ ID NO: 7166 - DNA, 55 bp, Triticum aestivum
  Clone ID: uC-tsrow189015a01b1
tggtctcttgtcgttgagggcgaggaaggcgaggagacggactacgcgctggaga

SEQ ID NO: 7167 - DNA, 466 bp, Triticum aestivum
  Clone ID: uC-tsrow189015a02b1
tttcgcctatgctgggctgttgcgcgtcgccctcgtcctcatcgccgccgccgcgacctgggcggcggcgctagacgacccggcggggcttctgcgacgggccaaggaggcggagttcatggactggatggtgggggtgcgccggcggatccacgagaaccctgagctcggctacgaggagtttgacaccagtgagctcgtgcggcgcgagctcgatgccatggggatcccctacaggcatcccttcgcggtcaccggcgtcgtcgccaccgtcggcacaggcggcccgcccttcgtcgcgcttcgggccgacatggacgcgctccctatgcaggaaagcgtggaatgggaacataagagcaaagtgcctgggaagatgcatggatgtggccatgatgcacatgttgctatgctattgggttctgctaagattcttcaggagcaccgtgacgagttgaagggtact

SEQ ID NO: 7168 - DNA, 320 bp, Triticum aestivum
  Clone ID: uC-tsrow189015a03b1
tttgccacaagccggagcagacgatccgccgtcgacgcgacctcctccgcccgccaggatcggagacgactatatagacggtctaggggttgaagcaacttaacaatgagtagcataggaactgggtatgatctgtccgtcaccactttctccccggacggacgtgtcttccaggtcgagtatgctggcaaggccgtcgacaacagcgggacgatcgttgggatcaaatgcaaagatggaattgtccttggtgtggagaagctgataacatcaaagatgatacttgctgggtcgaaccggagacttaattccgtgcaccg

SEQ ID NO: 7169 - DNA, 424 bp, Triticum aestivum
  Clone ID: uC-tsrow189015a07b1
ttgcaagcgagagagaggaaggaagaaaaaaaatggcatcgtcggcccgcgccgccgcctccgccgcgagatcggctctccgccgggcgcccctcgccgcctcctcgtcctcttcagctgccgggatcctccacaggtcggcggcggcgggcctggagacgcggatgcccctgcacagcgcggcgtcggcggcgcgcctcggatcctgcatcacccgagatggcgacaatgctttctcatggaactccaggcgcatgttcagttcaaatgagaaacatctgcctgcaatatctgacccgaaaattgagactgcatttaaggatttgatggctgctagctggaacgagcttccaggttctcttgtggaggaagcaaagaaagcagtatctatggctactgatgataaggctggtcaagaagcttt

SEQ ID NO: 7170 - DNA, 357 bp, Triticum aestivum
  Clone ID: uC-tsrow189015a09b1
tcgcgcgcggcgcctcctctcctctcttcccctcccccctcgccgccgccgtcgcgccagcgcctcctccaccaccgctcgtcctcctatacacaggtgcggaggaggagatgttggtgctcttcgagacgcccgcggggttcgccctcttcaaggtgctggacgaggggaagctcagcagcgtcgaggatctgtggaaggactttgcctcgtcggacaaagcaaggaaggtggttgagctgaaggctttcaacaagtttgaaaatacttctgatgctctttcagccgcaactttgctgattgatagcaagcccagcaagggtctgcgcaagttcctgcagaagcactgtgatggtg

SEQ ID NO: 7171 - DNA, 405 bp, Triticum aestivum
  unsure (1)..(405): unsure at all n locations
  Clone ID: uC-tsrow189015a11b1
tcgcccacgcgtccgcaccggctcaccaccacacagacaagcaagaatggcgatcgccgtgagcgggcactggacgcggctgcggacgctcggctgcggcgcgtcgggggccgtggtgtcgctggcggccgacgccgcgtcgggggagctgttcgcggtcaagtccgtgcgcgcggcggacgcggcgcagctgagccgggagcaggggatcctctccgcgctctgctcgccgcacgtcgtcggctgcatcggcgngcggtggcgaccgcgacggctcctaccacctcttcttcgagttcgcccccggcggctcgctcgccgacgaggccgccaggaatgggggccgcttggaggagcgcgccatctgggcgtacgcggcggacgtcctgcgcggcctggcataca

SEQ ID NO: 7172 - DNA, 469 bp, Triticum aestivum
  Clone ID: uC-tsrow189015a12b1
tagctgtcaggtttatgcgcactattatatccagaaatgatgaacatcttattcgccatgttgtcaagtttaacttgttgaaaccaataattgatgcctttgtggaaaatggggatagatataacatgctacaatccggagtactcgaactgttggaacacatacggaaggaaaatctaaaacctcttgttatttatgttaccgagtctttctcagatcaacttatgaagtttgaacacttcgggagcattcaggccttcaaactcaagtatcaacagtacttggagagtgccgatatgaaattaagtgctagtgtgcctgacatgagaaagaaggcagaaggaagaggtcttgagaaggaagaggaagattatttcaatgagagtgacgaggaagattcagtaaggcggactaaacatgcacacagtgaacataatgaagaaagcaaggatgatgtagccaatggaag

SEQ ID NO: 7173 - DNA, 438 bp, Triticum aestivum
  Clone ID: uC-tsrow189015b01b1
tgctaatgtgcctgtgccatatgatgacgccttttcatttttgccgcataccatgttgatggggtctaatcagggaacagcaggtgatggcatgggtctggaactcggccagttgcatcacgcaatttctcaaggccatccaattcagccagcaaatttcggctacgataattggcatcacaaccgtgatggtcagtatgctgatgatttcactgaagacattcgcctgaaaagccacgaactgctcgagggtgacgacatgcagcagctgctcagggtcttcaatatgggcggagcttctactggtttgccagacgaaacgttttccttccctttgcaatctccattgccaaacccagacttggaaggtgagcccagccgtccatcgggcaaagccgttgtcgggtggctcaagataaaggctgctatgagatgggg

SEQ ID NO: 7174 - DNA, 459 bp, Triticum aestivum
  Clone ID: uC-tsrow189015b02b1
ttccacgcgtccggcgccatcgagccgccctccccgctctccgaggtccgcgccgacccctacccgctccccgccgccttcgagtggttcacctgcgacctcgacgacgacgccctcctcgccgacctctacgccctcctcgcccacaactacgtcgaggacgacgagaacatgttccgcttcaactactccccggccttcctccgctgggcgctccgccccccctccttcttccgcgcctggcacattggcgtccgggccaaggagtccaagaagctcgtcgctttcatatccggctgtccccgcgcgcatccgtgcgcgcgacgacgttgtccgcatggccgagatcaacttcctctgcgtccacaagaaggctccgatccaagcgcctcgcgccagtgctcatccgggaggtcacccttcgcgtccacctggagaacatctggcaggctgcctaca

SEQ ID NO: 7175 - DNA, 370 bp, Triticum aestivum
  Clone ID: uC-tsrow189015b03b1
tttcccaaagaggaggaagaacaccaaggactgactgccagcgcctctccgcgatccaaatcctcccgggaaagttcttggttgatctcttcctcctcgaccgcctcccaggttcttggtgtagcttttgccactctcaccaggagatttcatgtctgatcttgacgttcagatcccaactgcctttgacccctttgccgaggcgaatgctggggacgctggtgcagctgccggatcaaaagactacgttcatgtacgcatccagcagcgtaatggtcgcaagagcctgaccactgtccagggcctgaagaaggagttcagctacagcaagatcctcaaagacctcagaaagagttttgctgcaatggta

SEQ ID NO: 7176 - DNA, 387 bp, Triticum aestivum
  Clone ID: uC-tsrow189015b04b1
taaagtgaagaactggaaaatgtctgcatacaagaaatttgaggagctggagaactcagggggtcttatccctgattatttcctgagtaacggccaccttgtcccagcagcgcctcccaacaatggtgccagtacttccaaaaatcaaactactgcagaatttggtgagcaacaaccatttctgcaggagagtggattcccactggcacagatctttgcaaaaaatgttgctgctccttcgaatcaagaaggaccaccatttacacagtgcagttacgaacaggttgcacatcaagaactatatcagcaggatccttctatactgtgtaatggaattcctccctatttgacccatggaaacatcaatggtcaggggatcattctcag

SEQ ID NO: 7177 - DNA, 311 bp, Triticum aestivum
  Clone ID: uC-tsrow189015b05b1
aatccgccccaaatcggcgaccgcacgggcggtggcggcggcggagatgggctgatggattactccgagttcccctttggcttcggggccactggtttcgggttctctcagcccgatcgtcgcccttccggatgtccaatctgaagggggtaccacatgaagttctgcaagtgggaaattaccatagaactgtccgtcacgaccataacaagatagttgaggttccccaggaagttggtaccattgagaatctgcagccgctgcggcgccgtgtcctcccccgcggccacaccaggtctaatattggatac

SEQ ID NO: 7178 - DNA, 362 bp, Triticum aestivum
  Clone ID: uC-tsrow189015b06b1
tacccccgaaaccaaccccatctaaaggacgaacagaggggaagcaaaaccctcgtcctcccccctccctgtcgtccgcaaccagccaaagccaatcccaagttgggagccggaaccgcctgccgcatcagccgtcgccgtcgatggaggcggactactacaaggtgctcggcgtcggccgcggcgccaccgacgacgagctcaagaaggcctaccgccgcctcgtcatgaagtaccacccggacaagaacccctccccgcaggccgacaccctcttcaagcaggtctccgtggcctacgacgttctcagcgacccggataagcgcgccatctacgaccagtacggcgaggaggggatcaag

SEQ ID NO: 7179 - DNA, 453 bp, Triticum aestivum
  Clone ID: uC-tsrow189015b07b1
tcgcccacgcgtccgattttcatctttaaggaacaaacttgaattgcttccacctggtgttctgattataggatcccacacccagatggacagccgtaaagagaaggcacatcctggtggatttctttttacgaagttcgctagtagcagccagacgctcttcgaccttttcccagacagctttggtagtcggttgcatgaaaggaacaaagaaagcccgaaggcaatgaaacatctaaataaacttttcccgaacaaaatttccatccagcttccacaggacgaagcattacttaccagttggaagcaacaattggatcgtgatgttgaaacccttaaagcaaaatctaacatcggtagcattcgtacgtttttgaatcgcagtgcgatcgaatgcagtgaccttgaagaattattcataaagatcagtcactgactaatgaaaatgtggac

SEQ ID NO: 7180 - DNA, 468 bp, Triticum aestivum
  Clone ID: uC-tsrow189015b08b1
tttaaattggcatctgagaaacgtaatattgagaaagaaattgatcatctggagccaggaaaggaggagttggaaagccgtcttgctaaaaacgaacgggaagtaagaaagcgggagaaaaaaataaatgagatagtcgacaggatctacaaggattttagcatgtcagttggtgtgaagaacattcgtgaatatgaagaaaagcaactgaaagatgctcaagcactgcaggagaggaagctaagtctgagcaatcaattatcgaaactgaaataccagctggaatatgaacaaaagagagatatgcatgctccgattgcaaagttaaacaacacacatgagaccctagagaaggagctgaagggcttgcaggagagagaaactcgtgctaaggctgatgctgaacatatttcaaatcagatggaagagctgaaggctgaggctgaagactggaagttgaagtcagat

SEQ ID NO: 7181 - DNA, 444 bp, Triticum aestivum
  Clone ID: uC-tsrow189015b09b1
tcttatgtttgcaaggaggctttggagaggggatttgttgtctctagtctaaatagatctggaaagccatcgacaagtgaatcttgggctgacaaagttatatggaaccaaggcaatcttcttgaacctgcttcactggaggatagtatggatggtgtctctgctgttgtatcctgtgttggaggctttgggtcaaattctcaaatgttcaaactgaatgggactgcaaacatcaatgccatcagggttgcagctgagaaaggcataaaaagatttgtgtatgtgtcagctgcagactttggtttagtgaattacttattgcaaggttattatgagggcaagagagctgctgaagctgaactgctgtcgaagtttacctatggaggaagtgatactgcggcctggttttattcatggaactcgtcgagtgggtagcgtgaacat

SEQ ID NO: 7182 - DNA, 319 bp, Triticum aestivum
  Clone ID: uC-tsrow189015b10b1
gtatctgcgagtttcgccctcgcgcgggcgacgggcggcggcggcggcggagatgggctgctgcagcagccggagctcggactcgccggccacccgcgtcacgcgctggcgctccaccgggatcgtcgccctccgggacgccaaactgaaggtggtaccacatgaagttctgcaagtgggaaattcccttagaactctggatttgacaaataacaagatagttgaggttccccaggaagttggtaccattgtgaatatgcaaaggctggttttggctggtaatttgattgaaaacattccagctaatattggatacctg

SEQ ID NO: 7183 - DNA, 432 bp, Triticum aestivum
  Clone ID: uC-tsrow189015b11b1
tttttagcaatccgccccaaatcggcgaccgcacgcacgccgtcgcggccatggcgaccgccaccgcttcctccccgtccccctttggcttcggggccactggtttcgggttctctcagcccgcggccacctcgtccgcctctcccctcttcggcgcacccgccacctccgccgcagcaaccacgcctagcatattcggggccgccacgaccacgcccagccccttcggcgcaccggccacctcgtctgcggccaccaccccgagcctcttcggcgccgtctcctcccccgcggccacaccaggtctcttcggtgcgaccaccgccgccgccagcacccccagtattttcggcgcttcttccgctgcgtccactccaggtcttttctctggcgccgccacgggcttcggcttcggctcatcggcatcaggct

SEQ ID NO: 7184 - DNA, 412 bp, Triticum aestivum
  unsure (1)..(412): unsure at all n locations
  Clone ID: uC-tsrow189015c01b1
ttggacgcgtgggcggacgcgtgggcggacgcgtgggcgatggcgtccatccgcctccttccgctcgctctgctgctcctcctgctcgctgtggcgcacgccgggaccccacggcaggagcccgccatccggctgccgtcgcagcgcgcggcggccgggcaggaggacgatgactccgtcgggaccaagtgggccgtcctcgtcgccggctccaagggctaccagaactaccgccaccagatatctgccacgcctaccagatcttgaagaaggggtggtctcaaggatgagaacatcattgtcttcatgtatgacgacattgcgcataacccggagaacccgaggccnggcgtcatcatcaaccacccccaggggggnagatgtctatgctggggtccctaaggactacact

SEQ ID NO: 7185 - DNA, 394 bp, Triticum aestivum
  Clone ID: uC-tsrow189015c02b1
ttggacgcgtgggcgccgccgccgcgctcgtgcgcctccctccccgccccacgacgagctccctgccacagcaaggttttggccgcgccggagcctcgctgctggccgtgcgtgcggccaaggactcggacgggttcagacgtctggtctctgagaagcccgagtggccggcgccggcgccggcgaagcgggaggggctggatggtttcggccgggaggcgagcaacggggaggaagacgggctggtgcagggcgagctggctccgtggagcgttctcagccagctcggcgtcgagttggattctgacagttcatatactgctctagtctatgggtcctccgccattgttgctatttggatatcatcgataggtggtttctgcacttgaatcag

SEQ ID NO: 7186 - DNA, 386 bp, Triticum aestivum
  Clone ID: uC-tsrow189015c03b1
tttcggttccttctccttcctcggagcttcagccatgggtaaagagaagactcacatcaacatcgtggttattggccatgtcgactctggcaagtcgaccaccactggccatctgatctacaagcttggaggtattgacaagcgtgtgatcgagaggttcgagaaggaagccgccgagatgaacaagaggtctttcaagtacgcctgggtgcttgacaagctgaaggccgagcgtgagaggggtatcaccattgatattgccctgtggaagttcgagaccaccaagtactactgcaccgtcattgatgctcctggtcaccgtgacttcatcaagaacatgattactggtacctcccaggctgactgtgctgtgctcatcattgact

SEQ ID NO: 7187 - DNA, 213 bp, Triticum aestivum
  Clone ID: uC-tsrow189015c04b1
tttttcaacaggcggaagcctatctggatgaggaaaccagaggagatcaacatggaagagtacgcatcttgatacaagagcttgaccaatgactgggaggagcatttggctgtcaagcacttctatgttgagggtcagcttgagttcaaggctgctctgtatgtgcctaagagggccccattcgacctatgagacaacaagaagaaggccaac

SEQ ID NO: 7188 - DNA, 463 bp, Triticum aestivum
  Clone ID: uC-tsrow189015c08b1
ttttccacgcgtccggttcccgttctcctctccccctgtcgcctccatagcagcagcagctccagctcgagcaagaaagaactagtttgatctgtgaaaatgttggccatcttccagaagcaggtggcgcacgcgccgcaggagctcaacagcccgcgcggcagcaccgccaagcccaagaaccccgacgagatcctccgcgacttccacgccgcccacccctccgacgccttctccacctccttcggcggcggcgccgccctcgcctgcgtcgccgcgcagccccgcaacctcgccgccggcgggtaccagaggatgttctgcgggctggacgacatctactgcgtcttcatggggacgctggacaacctgagcgcgctgatgcggcagtacggcctcacgggccgctccaccaacgaggcgctgctggtgatcgaggcctaccgcaccctgcgcgaccggg

SEQ ID NO: 7189 - DNA, 253 bp, Triticum aestivum
  Clone ID: uC-tsrow189015c09b1
tttttcctcctgaccacccacccacctaccagccaccaaggcggccgatctcccctccccagccgcgccaccgccgacgccgcagctccggcagccgttcgtctcgagattgatctttggtgactgttagaagccacagacactgaagatggcgcagcctgctgagctttcccgcgaggagaatgtgtacatggccaagcttgcagagcaggctgagaggtacgaggagatgggttgagttcatggagaaggt

SEQ ID NO: 7190 - DNA, 338 bp, Triticum aestivum
  Clone ID: uC-tsrow189015d01b1
tttcgtagctctcatgttggccatggcggtcacggcccaaaactcggagcaggacttcgtggacgcccacaacgcggcgcgcgccgacgtgggccttggggaggtgacatgggacgctacggtggcagccttcgcgcaggactacgcggatcagcgccgcggcgactgccagctgatccatactcctgatggccggccgtacggggagaacctctacggaggcggcgggaccgagtggacggcgacggacgccgtgaattcgtgggtgtcggagaagcagtactacgaccacgacagcaacacctgctcggcgcccgagggtgagtcgtgcgggcact

SEQ ID NO: 7191 - DNA, 394 bp, Triticum aestivum
  unsure (1)..(394): unsure at all n locations
  Clone ID: uC-tsrow189015d03b1
ttttcgagaccctgaacccgccgtgcctgctgacgccgtgcgaccaggcgccggagatcttcgacatcgccggccacttcgccgggttaggcagcgccgatgacctgcccaggacccccgtcctgtgcaagcccaacgtcggcgccatggaggcggccctcaggatcgccaacgtcaacccttacaaggcgattttcttcgacgacagcgtgcgcaacattcaggcgggcaagcgaatcggcctccacacggtgctggttggcacgtcgcancgggtgaagggcggcggatcacgcgctggagagcatccacaacatccgggaggcgctgccggagctgtgggaggaggccgagaaggcgagggacgtcctctacgccgcccgcgtggcgatcg

SEQ ID NO: 7192 - DNA, 411 bp, Triticum aestivum
  Clone ID: uC-tsrow189015d04b1
tttcagccccccgcccccctcctcccccacccacagcgcgcacgcggcgcagccgagagagcacgcgaggaggagagcaacccggccgctcggagctcccagcgctcacccggtaccgtcgggcggcagtggcctggcctggctctggcgcgtgcgcgtcctgtgcgtccgggagctgtggcggcgccgtctcggctgaatgcgatggacagctcgtagcggctgcttcagtcatgcactttctggcggtctaatctttccgaggaggcaatatcgtatgccttactacctggcattggctggcttagatgtcgtttcgtagcatagctcgtgatgttagggatggttttcggtagcttgtcgagacggagctttgatgtgacaatcgcaagcctttatggtcttactggg

SEQ ID NO: 7193 - DNA, 459 bp, Triticum aestivum
  Clone ID: uC-tsrow189015d07b1
tttccgaatccccgcgccatctccgtaaccctctgctcgccctcctcttcctcgcagcagcagcagcgtcggcagcccagatcgccatggcggccgagccggagcagcaggcggccgtgcacatcgtgtacgtcgaccgccccgaggacgccgaccccgaggagttccacatccgcaccctcgcccccgtcctcggcaggtaactgtgccgtggaatcggaccggatccgcagccgtttggctcgggtttgcgccgccctgcctgtgggatctaggcctttgggggtccgatttagcttggccttgtcgttttggggttgattcgttctcttgagactttttccggccgtgtgtcaatttgctgatctggggggaattttggcagcgaggagaaggccaggggcgccgtcctttaccactacaagcacgccgccagcggattctccgcaaagctcacca

SEQ ID NO: 7194 - DNA, 424 bp, Triticum aestivum
  Clone ID: uC-tsrow189015d08b1
tttggttcatgtccgacgtgcaggtcgccgaggccagggccttctacggcttccagatcgccatcgagaacatccactccgagatgtactccctgctcatcgagacctacatccgcgacgacgtcgagaaggaccgcctcttccgcgccatcgacaccatacccgccgtgcgccgcaaggccgactgggccctgcgctggatcgacggtggggagcgcttcgccgagcgcatcgtcgccttcgcctgcgtggagggcatcttcttctcgggctccttctgcgccatcttctggctcaagaagcgcgggctcatgccgggcctcaccttctccaacgagctcatctcccgcgacgagggcctgcactgcgacttcgcctgcctcctctacgacatcctgcgcggcaagctggacgagtcacgcgt

SEQ ID NO: 7195 - DNA, 448 bp, Triticum aestivum
  Clone ID: uC-tsrow189015d09b1
tttttgatccgttggcctcctgttcatccgctcccccctcccgccgccgcctccagcctagggtttcctcccgccgtccgccacacccgccgccatggctcgccgcagcggaggaggaagatcttcccgccctgctccacgtgctgctccagtgagaaacccaccagcgccagcccgtcaagctcctccacctgctactacccagagcagcggtggtggtatcatgagcggaattgggtccactattgctcagggcatggcttttggtactggcagtgctatggcgcacagggctgttgatgctgtgatgggtccccgtaccattcagcatgagactgttgtcggtgaggctgctgcatctatgactccaatggacaacgctgctgatgacaagtgtggcaacccttccaggccttccaagattgcatcaaccactacggcagcgaca

SEQ ID NO: 7196 - DNA, 461 bp, Triticum aestivum
  Clone ID: uC-tsrow189015d10b1
ttttctctctcgactccggccagtctcttcttctctagaaagctagcgaggcttggaggtgagcgaaaatgccggtcagcaggatcgccgtggggagccaccgtgaggtgtacgaggtcggcgccctcaaggcggcgctcgccgagttcatctccacgctcatcttcgtcttcgccggccagggctccggcatggccttcagcaagctgagccccgacggcgcggcgacccccgccggcctgatctcggcggcgatagcgcacgccttcgccctgttcgtggcggtgtccgtgggcgccaacatctccggcgggcacgtgaacccggccgtgaccttcggcgccttcgtgggcggcaacatcaccctcttccgcggcctgctctactggatcgcccagctcctgggctccaccgccgcctgcttcctcctccgcttctccaccggcgggctccccaccggc

SEQ ID NO: 7197 - DNA, 296 bp, Triticum aestivum
  Clone ID: uC-tsrow189015e02b1
tcatgagtagcttgttattgaccgtgccatctctactgcgagtgtgatcgagctagtgatcaaacgcgagaagatggcgttgcactggagcggcggcctcgctgtcgcggtcgcggcggcgctggccgtgtccgcgctcttcccggcgggcgctgcgggtcacccgccgctcccaggcccgttggtcccgcagttctacgagcacacgtgcccgcagatgcaggcgttggtgggcgccatcgtggccaaggagcacgccagggacccccgcatggcggcgtccctgctccggctgc

SEQ ID NO: 7198 - DNA, 261 bp, Triticum aestivum
  Clone ID: uC-tsrow189015e03b1
ggcgcctctccttccgtctccctccgatccccgcaagattcttggagcaaccccctcttgcttctcgctctcgtggcggcggcgcttctttacctcgccgccttcgccgccgccgccgccagcgcgcacgccggattcttcggccgccccgtcaagctcctcgcctcgctcctctccgttcccgcgtccgttctccgcctcctcctcacagccctcccggcctcccctcttctgcttatccccctgctcccactgcccgct

SEQ ID NO: 7199 - DNA, 221 bp, Triticum aestivum
  Clone ID: uC-tsrow189015e04b1
ttgacgcgtgggctgagcccgagtcatggacctctctcgccgctgacggcgacgacgacgatgaagaggagctggcccctatgacaccgcctgctgccaaggcctcggccccggccgctgctctgccggacgtggtggtgaaggcgagcaagggatggcaggaggtgttgccccggcgtggtccgcgtcgcccgacgtcgctagcccctgcaatggctccc

SEQ ID NO: 7200 - DNA, 309 bp, Triticum aestivum
  Clone ID: uC-tsrow189015e05b1
tttcacgcgtccgctttatggtaatcttaaaagaatatgcgagacaaatcttggattgatctctcaatgctgtctcacgaaacatgttaaaaagacgacaccacagtatctcgcaaacgtcgcccttaaaatcaatgttaaggtgggagggagaaatactgtacttgttgatgctttgtcaaggagaattccccttgttagtgacagaccaaccattatatttggtgctgatgttacccatcctcatcctggagaagattctagcccttccatcgcagctattggcccgaggtcaccaagtatgctgga

SEQ ID NO: 7201 - DNA, 424 bp, Triticum aestivum
  Clone ID: uC-tsrow189015e06b1
ttcgagcaaaatgaatcccatagccaaatgttacctgatgttcttcctccttttggcagttctcttgcccgaggcgcgcgcgaattcgtgccaccccggcgacctccgtgcgctgctggactttgccgggagcctcaatggtcgggatgtcctcctccgtgccacgtggtccggcgccgcatgctgcagctgggaaggcgtgggttgtgacgccgccaacggccgtgtcacggcactacgcctccccgggcgaggccttgagggggccatcccaggaacctcacttgcaggccttgcgcagctcgaggaactcgacctcggctccaacaactttcacaacatctcaggggtgctcaccgtgttgcatgggtgccagaacctcgccacgttgattctcacaagaattttgatggtgaagagctac

SEQ ID NO: 7202 - DNA, 461 bp, Triticum aestivum
  Clone ID: uC-tsrow189015e07b1
tgtgccattttccgcagcatggcaatattaggtgtcgatggcttctcatcgctaccaaagaactgccttactctctgctacatattctttgttggagcaatcgttgtcaacttgataagagatcttgttcccaagaaggtatcaaacttcataccaatcccaatggcgatggcaatcccattctacataggatcgtatttcgccatcgacatgttcatcgggacagtgatcctttttgtctggcaaaggctggacagagccaaatcggaaacatttgcacctgcagttgcttccggcttgatttgcggcgatggactgtgggttctgcctcagtcggtgcttgctcttgccaaggtgaaacctccaatctgcatgaagtttctgtcaagagggatgaacgacaaggtggatgcttttatcacaacattatcgtagaatcttagggaaaaggagaagttaca

SEQ ID NO: 7203 - DNA, 381 bp, Triticum aestivum
  Clone ID: uC-tsrow189015e09b1
ttttccacgcgtccgcatcggccacgccacgcaagaacacaaacacagccctcacacgcgagtcgccaagaagaaaagtcccaaactttttccccctgatcgatccgccctcctcctcctcgtcgccgcaggagtttctcccgggattcgccgccccctccttctctctccggcgaccgatcggatcccgccggccggaggcccgagccccgcccgatctacccacccgatggcggccaacgccggcgccggcgccggcggcagcaagatccgcaacgccaagctggttcttctgggcgacgtcggcaccggcaagtccagcctggtgctccgcttcgtcaagggccagttcgtcgagttccaggaatcgaccatcggcgc

SEQ ID NO: 7204 - DNA, 308 bp, Triticum aestivum
  Clone ID: uC-tsrow189015e10b1
ttttcgccaaaccagatcggctcggctgcttcctcttcttcaacttcgcagaatcgctggtcttctcgtcctctagttaagtccctcgacagcaatgggaggaggcaacgacggtcatgggtacccacccggtggccaggggggataccctccgcaagggtacccgccgcagcagggaggttaccctccacagcaaggatacccgcctgcacctggagcttacccacctgcacctggggcataccctcctgcacctggggcataccctcctgcacccggagcgggtggcagtgacggggagaaggggc

SEQ ID NO: 7205 - DNA, 448 bp, Triticum aestivum
  Clone ID: uC-tsrow189015e11b1
tctgtttccccgtctccccgtctccccgccgcctcctcctcctccgcgtcgcaaaccctcgtcctaatccgccgaatcccgcgacccacgaaccaaggcagatcgatggcgaagagctcgttcaagctggagcacccgctcgagaggaggcaggcggaggctaaccgcataagggagaagtactctgacagaattcctgtgatcgttgagaaggctgggaagagtgatattcctgacattgacaagaaaaagtacctcgtccccgccgaccttacggttggacagttcgtgtatgttgtccggaagcggatcaagctcagtgctgagaaggcgatcttcatctttgtgaagaacactcttccaccgacagctgccctgatgtctgccatttacgaggagaacaaggacgaggacggcttcctctacatgacctacagcggcgagaaca

SEQ ID NO: 7206 - DNA, 493 bp, Triticum aestivum
  Clone ID: uC-tsrow189015e12b1
tctttttccccgtctgtctttcttctcggcggaggcgaacgacgaaccctagccgcgcgaggaacgccaagatccccaaggccggcgacgatggcggcggttcggtgcgcggcgaggaggctcggcggctctctgctccagcgaacgcaggcggcggtcgcggaggagggacgcctgctcgcgccaagcaggctcatgcgctcccgccagctctccaccaaggtctccggcgagcgatcgcaggtggcggagcgacacctcctcgagccaggcagcctcatgcgctcccgccagctctccggcgagcatgctcgcaacatccagaagaaagaggatgactgctgggcggggttcaatgagacgctaaagaggttggacgagcttcaaaaaaagaagaaaccaagtgtctttcagcagcgcatgatatccatcgaccgtgcgttgaagagtttggtctatggatctttaaggtgacagttgtgtatgtggctgc

SEQ ID NO: 7207 - DNA, 274 bp, Triticum aestivum
  Clone ID: uC-tsrow189015f01b1
tttaagaggaggaagaacaccaaggactcactaccagcgcctctccgcgatccaaatcctcccgggaaagatcttggttgatctcttcctcctcgaccgcctcccaggttcttggtgcagcttttgccagtctcagcaggagatttcatgtctgatcttgacgttcagatcccaactgcctttgacccctttgccgaggcgaatgctggggacgctggtgcagctgccggatcaaaagactacgttcatgtacgcatccagcagcgtaatggtc

SEQ ID NO: 7208 - DNA, 219 bp, Triticum aestivum
  Clone ID: uC-tsrow189015f02b1
tttcagaacttgtgcttatccgtctctgtactgcacgtctgtttgtggggtcctcctggcaaacatgtcgagcgcttcgggacgggcggtttgacgagcaatgagatcgagcgctggtggggaggtatctcacggtaatggtgggcgtggcggagcggcgctggatttcgatggcatggagttcctactagagccagttgaccggttcccactcaggga

SEQ ID NO: 7209 - DNA, 258 bp, Triticum aestivum
  Clone ID: uC-tsrow189015f04b1
ttttccacgcgtccgcccacgcgtccggagtttgacttggtccaagattgatgccaaattgcaagctggaacatctgattcagctaaaacagcacaaggctctccatgtgctggccattctttggtatcatgcgggaacaaaatcttctttgttgctgggcatacaaaagaaccatctgacagcattacagtgaaggaatttggaccacatacttgtacctggtcgattgtgaagacttaccgaaaaccaccggtttc

SEQ ID NO: 7210 - DNA, 71 bp, Triticum aestivum
  Clone ID: uC-tsrow189015f05b1
cccttgagggtatcaagcatttctatgtcaatgtggagaaggaagagtggaagctcgacacactgggtgac

SEQ ID NO: 7211 - DNA, 358 bp, Triticum aestivum
  unsure (1)..(358): unsure at all n locations
  Clone ID: uC-tsrow189015f06b1
ttgaaaccgcgccaggacctccgccgatcaaggagaatcaagaagccggcgtacagaccgatccatcgatcgacccttgcctgagccggcagcagcagccatgaacaacctgttctcgagttcgtggaagcgcgcgggcgcggggggcgacggcggggacctggagtcgggcggcggcggcggggtggagatgactggcgccgccgggcgccgcggcgggggcgagcctggaccgcttcttcgaggacgtggagtcgatcaaggacgacctgcgggagctggagcggatccagcgctccctccacgacggcaacgagtcgggcaagtcgctccacgacgcctncgccgtgcgcgcgct

SEQ ID NO: 7212 - DNA, 469 bp, Triticum aestivum
  Clone ID: uC-tsrow189015f07b1
ttttccacgcgtccgcgcagctcgactcgcagcagcagcagccggcggagatcgtatcatggcgatggagggctacgaccgcgagttctggcagttcggcgaccagctgcggctccagacggccagcttctccggcctctccctcggcgactccatctggtcccccgccgacgccgccccccgcgcccgcaacgccgacctcttctccccctccccggcgcccgacaacaacaacgccgccaagatgaacggcaacggcctcaacgggcccggcctcatcgggtccggcaagctcgccttcggcgccaccaccaccagcaaggccgaccgctacaacaacgtcagcctccccgccgccgccgacgccaacgccaagccctacggcaacgccaacggcctatacggtgccaagcccaacaacgccaccaacaacggctttatggctcaacaagatggctgccggcggcgg

SEQ ID NO: 7213 - DNA, 444 bp, Triticum aestivum
  Clone ID: uC-tsrow189015f08b1
atgttttggtgcccttaagggagctttggatggtggtcttgacattccccacagtgacaagagatttgctggttttaagaaggacgagaagtcgctggatgctgagattcaccgcaagtacatctttggagggcatgttgctgactacatgaggtcactagcagatgaggaaccagagaagttccaaactcacttcagtgagtacatcaagaggggaatctcagctgatgacatggaagcagtttacaagaaggttcatgctgccatccgtgctgatcccaccatggccaaatcaaccaaggcgcctcccaagactcacaagaggtacaaccccaagaagctgacttatgagcagaggaaggccagcctcgtcgaaaggctcaacgccctcaacaactctgccggtgccgccgatgatgacgaggacgacgaccagtgaaatgc

SEQ ID NO: 7214 - DNA, 407 bp, Triticum aestivum
  Clone ID: uC-tsrow189015f09b1
tctagactatttactatcactgttgtttggtatttgaacatgtcttttcgagggggagatgggaacagatagactcagtgaaagttggctgcacgtaaactattgtgatcaagttggaaaaaaatgtttcccctcttaactgctcctgttggagactggggtcagtagtcactgaaatttgcacacgcatggaggaatgaatgatgattctcaagtaacgaagttgtagccttcacgacaagataaatggatgattttgcagctcaagtgttgctacatgttacagataactatggcattccattttaatgaatctgcatattgctgttgagcaccggaagcgagggagggcatggctgcctggaggttgtcccaaggcgagggcagggcagagacatgcaacaatg

SEQ ID NO: 7215 - DNA, 434 bp, Triticum aestivum
  Clone ID: uC-tsrow189015f11b1
tttccaccacagccgccgcctcccccaccaacctgccccgacccgctcccgacctccgaggcaagcagcgcctccgccatggcgttcgagaagatcaaggtcaccaaccccatcgtcgagatggacggcgatgagatgaccagagtattctggcagtctatcaaggacaagcttatcttcccatttttggacttggacattaagtactttgacttgggagttctacaccgcgatgcaactgatgacaaggttacagtggaggctgcagaggctactctcaagtacaatgtggctattaaatgtgcaactattactccagatgaagatcgggttaaggagttcaacctaaaataaatgtggaggagcccaaatggcacaattaggaacattataaactgcaccgtgttcagagagccaattatatgcaagaatgt

SEQ ID NO: 7216 - DNA, 223 bp, Triticum aestivum
  Clone ID: uC-tsrow189015f12b1
tttttcacgcgtccgccacgcgtccggagcaggccgagttcaagaggatgtacagtcttatttaggagtacaagctgaagggccatatccgttggatctccgctcagatgaaccgtgttcgcaatggagagctttaccgctacatctgtgacaccaagggtgcatttgtgcagcctgcattctatgaagcgtttggcctgactgtcattgaggccatgacatg

SEQ ID NO: 7217 - DNA, 291 bp, Triticum aestivum
  Clone ID: uC-tsrow189015g01b1
tgggacaggttgggacagttcgaagggagttattgtcatggacaatgagtggtggaagaaggcgagaaaggacattcctggatgtggcaagtttagaaaaaagcctcttcaaaatctggagcatctttccaaaatggttggtgatattttgaatgatgaacaagatcattggaatcccatgagtgacaaccccatcatacccccaagtcaagagaattttgttgatgttgataatgttgttggagttggagagaaagaaggttcatgacatccctgatgatattggtaatg

SEQ ID NO: 7218 - DNA, 279 bp, Triticum aestivum
  Clone ID: uC-tsrow189015g02b1
tcacgcgtccgcccacgcgtccgcccacgcgtccgtgaatcgggagcctaaatcatcggccgcgatttgagactctttttctcgagggaagaatcagaaagggacaagtctgagatgaatcataccttttgtttctatttgaagccacttgcttcctggcagtgttataagaagagtggcatggggtttccccacttattatttcccttctagcttcaatctgtagtacgctgtttctgaatgtacgaaaacaggccaattttttgcattcgatcttct

SEQ ID NO: 7219 - DNA, 282 bp, Triticum aestivum
  Clone ID: uC-tsrow189015g03b1
gcgctgacgcgtgggtcgcactctacgagacccgcagcctagagtcttactcctatcacccgacccgatctcctcctaggtttcgctccccaccaccgcggaacgaaccggaaatggcggcgcggcacctcagatccggcctcccgctcctccaagcccgcctcgcggctaacgaatccgaggacgaaggtcaggtgtcgagggggcttgcaacggaggcggataagcctaaggagaacaagatcaaggttccaaaagctctgtatggcggcacgggcaact

SEQ ID NO: 7220 - DNA, 194 bp, Triticum aestivum
  Clone ID: uC-tsrow189015g04b1
ttcagagcagaagcagaagcaggcaacaggcgagcaggaaggaagcaagagaggtggagatggcgcccatcaagctgtacgggatgatgctgtcggccaacgtgacccgcgtgaccacgctgctcaacgagctcggcctcgagttcgacttcgtcgacgtcgacctccgcaccggcgcccacaagcaccccgac

SEQ ID NO: 7221 - DNA, 415 bp, Triticum aestivum
  Clone ID: uC-tsrow189015g05b1
cgtgactcaggagaagccccggcagccgccgctcgagatgcagactcagccgaaaacaagctcttcttatggttccttcatgatgagggatgctccccctgcctgagctgccagcattcatccagcggcggccggcaagagggtgcgggatgcctcagtgcagtcacaggccgcacccaggcccggcttccactgcggattgcgagccagatcaacggctgaagggcttccagcccatatcccttactattcagtagagagtaacaagttgcaccggccaggctggtgtatgttgcggttgctagcacgcctgaccccttggaggggaaaggacaagaaataagagtaaagtagcaagctgcagcgatgtgtatatttcactttgtccagcccaggttccctcccagctgggctc

SEQ ID NO: 7222 - DNA, 408 bp, Triticum aestivum
  Clone ID: uC-tsrow189015g06b1
tttattccgtgtggccaccgagcgaaccctagccgagattagactaccatccccaatctagcggaggaggacgaggacgacgccgacgagatgctgagggttgcggggaggaggctctcgtcttcgctctcctggcgccccgtggcgaccgtcggagccaggggcccgctcgccggcgccggcggccctgggagagacgacgacgacggttcggcctaccagcggcggttcgccatcgagtcccccttcttcaccgccgcgagaggcttttcttcggctgaaacacttgttccacggaaccaagatgctgggttggctgaactcccagccactgttgctgcactgaagaaccccaactcaaaaatcctttatgaccagtacaaccatgaaagatatcctctgggagat

SEQ ID NO: 7223 - DNA, 451 bp, Triticum aestivum
  Clone ID: uC-tsrow189015g08b1
gtagaagtcaagtgatgagagcagcaaggagattgtctcaagtcagccagagggaagcagtcccccggagccagagaaagcttctgacagcaatagtgacggaagctcatctccgggcaagaaaacaagtggaagcaaactttcagcctcagcacctccattcaaacctggatcgctcttatcggtgtcccatccttacagcacagtggcaatatatgatgctagcgttgtgcttcagccaatcccaagtcaagcaatggagattctccctcatgctgtcgatacttagagtacctccgtggtcctcggtccaccttgtactatcgtactggacattctttccaaaggaaacagggttatacacagagccagagcactattctgaggggcagcacctcccctccaaccatgaacccccatgctgctgagtttgtgcctggaaaaactgtgc

SEQ ID NO: 7224 - DNA, 463 bp, Triticum aestivum
  unsure (1)..(463): unsure at all n locations
  Clone ID: uC-tsrow189015g09b1
ttgtaagtagccacaaaactcatcaccagagcccagagagagacagagtactacactccagcgccggccgttccatttcgctccgccctcccgccttgtcccgttgctgagttcgcgtccgctcgccaggaggagcagttcgccgccgttgaagggtcctcccccgtcgctagccgcgatgaagaaggttgtgctcaagctggatgtgcacgacgacaggcacaaggccaaggcgctcaaggccgtctccggtctccacggtatcgaccagctgggtgtggacatgaaggaccagaagatgaccatcgtgggcaccgtcgaccccgtagcccgtcgtcgccaagctgcgcaagctcttccccggtgggcagnatcgtcctccgtcggcccggccaaggaggagaagaaggacgacaagaagcccgccggagacaagaaagagggcgacaagaaggagggcggc

SEQ ID NO: 7225 - DNA, 264 bp, Triticum aestivum
  Clone ID: uC-tsrow189015g10b1
tggtcgagaagcagaaggcccaggcggcgcaacaagatcagactcagcctcaaacaagctcttcttcttcttccttcatgatgagggatgctccccctgccgcagctaccagcattcatccagcggcggcgaggcgagagggcaggggatgcgggcagagcagacgcaggccccaccccggacggggcttccactgtggatggggagccacatcaacggctgaagggcttccagcccatataagcgtactattcagtagagagt

SEQ ID NO: 7226 - DNA, 464 bp, Triticum aestivum
  Clone ID: uC-tsrow189015g11b1
ttaccaaggagaagccccggcagcagccgatcgtgatggaggccgtccggatcctcaagcgcggcgaggagcccccggctccctcccccgcccctgcgcctgtccaggcacgggcgcaagccccgccggccgacaggcgggtgcggtctccctcccctgcctcaccgcccgtcgtcaaggcccggccccaagccccgcctgcggacaggcgcgtgcggtctcctcccccagccacagcacccatcccggcccgggcgcaagccccgccggccgacaagagggtgctccggaccaccagccggatcggcccgcagcaacccgccgtcgtgccaaccaagaagatggtgccgctcgccgtcgcagccagctacgccggcccggcgttctcggccgcggccccggagccgagctctctccccctccctgggttcttcttccgccgcgccgaggaagaggccacccgc

SEQ ID NO: 7227 - DNA, 252 bp, Triticum aestivum
  Clone ID: uC-tsrow189015h01b1
ttgtaagaagcccagcgagaagataaaaagcctcaaggcccatttccccatctctatcatcggcggcggcggctcgagcagaggaaaggaagctttctaccctagcagagaaaaaaaaagcagaggagaggaagcggaggcgacgatgtcggcgatgactgcggcggtgcccttctggcgcgcggcggggatgacctacatcggctactccaacgtctgcgcggcgttggtgcggagctgcctcaaggagcc

SEQ ID NO: 7228 - DNA, 312 bp, Triticum aestivum
  Clone ID: uC-tsrow189015h03b1
tctgcagcaggtggccatggccgactcccccgagttagctcgtgctcgggacgtcctgagcgtgcgcgccgacgagcacgcgcgggtggacgcgctctcctccgccgcatccgcatccgcatccctatcatcggccactactcatctgtcgccgagcttcttcgagggattcgcgctgcgcgggatccgcgtgctccgcctccatccggggttcatccactgctcctacaccgtccccccgagcctcaccgactccaccaccggctgcctcgccgccggtgcccgttgtcgccctggtcgacgagatcggct

SEQ ID NO: 7229 - DNA, 409 bp, Triticum aestivum
  Clone ID: uC-tsrow189015h04b1
tttttggagagaaatggtccggacatcagtgagtagaagtttcaaccaaattactgtggatggtgatacaagtacgaatgactgtgttattgctatggctagtggattatctggtttgtcggacatcctcactcatgatagcgttgaagctcaacagctccaagcatgcctagatgcagtaatgcaaggcctcgcaaaatccatagcatgggatggtgagggtgcaacctgcttaattgaggttactgtaactggtgcaaataatgaggcagacgcagctaagattgctcgttcagtggcagcgtcctccttggttaaagctgctgtatttggccgagacccgaactgggggcgcattgcttgctctgtcggatattcagggattcattttgatgcagatcaacttgat

SEQ ID NO: 7230 - DNA, 309 bp, Triticum aestivum
  Clone ID: uC-tsrow189015h05b1
tttcgctgcctcgcaccaaaacacaactaccaccagcggcagcagttcgactccggagaggcagagatgggctccaccgcaaccgacatggccgcctccgccgacgaggaggcgtgcatgtacgctctccagctcgtctcgtcgtcgatcctcccgatgacgctcaagaacgccatcgagctgggcctcctggagaccctggtggccgccggcggcaagctgctgacccccgccgaggtggccgccaagctcccgtccacggcgaaccccgccgcggcggacatgggtggaccgcatgctccggctgct

SEQ ID NO: 7231 - DNA, 376 bp, Triticum aestivum
  unsure (1)..(376): unsure at all n locations
  Clone ID: uC-tsrow189015h06b1
tttggatcccggcgctgccccgccccgcccccacctcctctctcgctcccggcgccccgctgcttccacgcgccaccgccggccccctgcttccacgcgccgccggcggccccgctgcttctagccgccactgtcgggagccaccatagcgccaccaatcgccacgaccagtcgtccctaccgccgccttggcgacctacccccaccccccgcagggggccatcgcttcgtgtcaccgcatccggtggccacagcgtgccgtccaactcggcagtccaactgcttgctccacggntcggtcgctcaagtagctgcgtgcaggcaaacatctccacgggcgacaagttcttctttcacaacttgttgctgctgctgc

SEQ ID NO: 7232 - DNA, 327 bp, Triticum aestivum
  Clone ID: uC-tsrow189015h07b1
tcatcttcgacggccgagcttacagcatcacgaaggatgtcttgcagctgtggatcaagctgcggctgcggctcaaactgcaactgcggcaagatgtaccctgacttggagaagagcggcgccaccgtgcaggccaccgccgtcgtcctcggcgtcgggcctgcgaaggtgcagttcgaggaggccgccgagtccggtgaggccgcccacggctgtagctgtggcgccagctgcaagtgcgacccttgcaactgctaaggtgcaagcggttgatgcgcttctggtgattgtgccgtgtgtgatcgagtgcgaataatgaaaccgacg

SEQ ID NO: 7233 - DNA, 149 bp, Triticum aestivum
  Clone ID: uC-tsrow189015h08b1
ttttgggccgtgcgatcacttacgacatgggctgaaggaggacctacgccgcgcttgtctactactcattctacaacgccacggagttcgcgaagactgcgtctgctaattaggtctagggcgaggatgctagatggaactgcaaactt

SEQ ID NO: 7234 - DNA, 134 bp, Triticum aestivum
  Clone ID: uC-tsrow189015h09b1
tgataaaaaaaaaaaaaaaaaaaaaaaaaaaaaaaaaaaaaaaaaaaaaaaaaaaaaaaaaaaaaaaaaaaaaaaaaaaaaaaaaaaaaaaaaaaaaaaaaaaaaaaaaaaaaaaggggcggcccttttagagg

SEQ ID NO: 7235 - DNA, 434 bp, Triticum aestivum
  Clone ID: uC-tsrow189015h10b1
tttcgtgatgtctgccctcttcctacgaaataactacatctctgttggtgcatctggagctttatttgggctgcttggatctatgctttctgagctacttatgaactggactatttactccaacaaggttgcagccataataacccttctgtttataatcgcgatcaacgtggcaatcgggatactaccgcatgctgataactttgctcacattggtggattcctgaccgggttccttttggggttcgttctgctggcaaggccacaattcggttggttggaacgcagcgagctgccccataccaatcagccccccaagtacaaaccataccaatatgtcctggtgggttgtggcactcgtcttgctgcttgtcgggttcacgctttcgttggtgatgctcttcaagggcaagaacgggaatgacggctgccac

SEQ ID NO: 7236 - DNA, 337 bp, Triticum aestivum
  Clone ID: uC-tsrow189015h11b1
tgtcaaatccgaacctcctccagagtccaaaccccaacctaggaaatggaggcgctcgtggtgcggaagcttggcgatcccacgctgccgcccggcggcgaggactcgccgtttgcggcggtctccggtgaccggccgattccggaactctcctccccgacctccgtgcgggtgcgcgtggcggcaaccagcctcaatttcgcgacgttcctgcaagtgcagggcaagtaccaggagcgccccccgctgccctacgtcccggggtccgactacgccgggcgtcgtcgacgccgtcggctccggcgtgcgcagattccgccccggcgaccgcgtctgc

SEQ ID NO: 7237 - DNA, 382 bp, Triticum aestivum
  Clone ID: uC-tsrow189015h12b1
ttgtcaatgccagttcgtcacgggccggctgtacaacttcagcgggacgaaccagcctgacccgaccctcgacgcgacataccgagccttcctgtcacagagatgcccgaggaacggcgacggaacgtccctcaacgacctcgacccgaccacacccgacaacttcgacaagaactacttcacaaacctcgaggtgaaccgcggcttccttcagtcagaccaggagctcaagtcggaccccggcgcggcggggacgacggcgccaatcgtcgatcggttcgcgggcagtcaggaggccttcttcagtagcttcgtgacttctatgatcaagatggggaacattaggcccgtcacagatccctcccagggagaagtccggaac

SEQ ID NO: 7238 - DNA, 279 bp, Triticum aestivum
  Clone ID: uC-tsrow189016a01b1
cacctggccaccatccccatcaccggcaccggcatcaacccggcgaggagcctcggcgcggccatcatctacaacagggagcacgcctggtcagaccactggatcttctgggtcggccccttcatcggcgccgcgctcgccgccgtctaccaccaggtggtcatcagagcgatcccgttcaagaccaagtcctaagctgctgttcttcctgctacaaagaagatgccaacccaacccgaagagcaaagctggcgtgttctgaatttctgatggggcggc

SEQ ID NO: 7239 - DNA, 298 bp, Triticum aestivum
  Clone ID: uC-tsrow189016a03b1
cgcctcatcaccgacaagcacccatggggctacatgcagtcgtcgtcggacgaggcacagctgctggggatgctgatcaagatggcgggcgccaagaagacgatcgaggtgggcgtgttcacgggctactcgctgctggccaccgcgctggcgctcccggaggacggcaaggtggtggccatcgacaccgaccgcgagtgctacgaggtgggccgccccttcatcgagaaggccggcatggcgcacaaggtggacttccgcgagggcaccggcctggcgcgcctggacgagctgctcg

SEQ ID NO: 7240 - DNA, 307 bp, Triticum aestivum
  Clone ID: uC-tsrow189016a04b1
tttcagcaacaaagaaaagacagatgatgaaaagagtgcaatggaggagaagaagggccagtacgccaagttctggaatgagtttggcaaatcagtcaagctgggaatcattgaagatgcaacaaacaggaaccgtcttgcgaagcttctgagatttgagagttccaagtcagatggcaaacttgtctcccttgatgagtatatttcaaggatgaagtcagggcagaaggacatcttctaccttacaggaagcagcaaggagcagctagagaaatctccattccttgagcagctgaccaagaaaaac

SEQ ID NO: 7241 - DNA, 212 bp, Triticum aestivum
  Clone ID: uC-tsrow189016a05b1
tcgcacccagctctgccccgccccagcgcgtcgccacccggcgccgccccaaacctcacccaggcgggaagggagcggcacatcgagccgcatctccccccaaaccgcgcccgcgacgagaggagctcctgcatcccgccggtgccgcctcaccctcccccggtcgccgccctccggtgccgcgccaaggaaaggtttattacctgcaggaa

SEQ ID NO: 7242 - DNA, 303 bp, Triticum aestivum
  Clone ID: uC-tsrow189016a06b1
tgatcggcggctatacaccgtgaactgcgccactagactaggaagaaaatggggtggaagggcgtcctggggttcgactacggcgtcgtgcaggcaccgctcggccccgacatctccggcccggagctcgccgccgccgtcgccaacgctggcgccataggcctcctccgccttcctgactggccggcgccggaccacgtgagggaggttgatacagaggaccaggagcctgaccgagaagccgttcggggcggccattgtgctggccttcccgcacgaggagaatctgagagtcgtgctgga

SEQ ID NO: 7243 - DNA, 223 bp, Triticum aestivum
  Clone ID: uC-tsrow189016a08b1
cgatgagacacagctggacatcctgataggcgtgctgtcggtcaccacctccgtgtcaatatgccacgtggatgacctctgtcgcgcccaggtgttcgtagccgagaatgagtcctcgacgggcaggtacatctgtgaagccacgacaccaccctcgtgcagcttgcctctctcctggccgaaaagtacccacaataccaatgtgaaacttgaacgctttgct

SEQ ID NO: 7244 - DNA, 305 bp, Triticum aestivum
  Clone ID: uC-tsrow189016a09b1
actatgggaagaccttcaagaagccaaggcgtccgtatgagaaggagcgtcttgacgctgagctgaagctggttggggagtacggtctgcgggccaagcgtgagctctaccgtgtgcagtacgccctcagccgcatccgaaatgctgccagggagctgctcaccctggatgagaagaacccccgccgtatctttgagggtgcagcgctcccccgccgcatgaaccgctacggtcttctcactgaggaacagaacaagcttgattatgtgcttgccctcactgttgacaacttcctcagcgccgtc

SEQ ID NO: 7245 - DNA, 343 bp, Triticum aestivum
  Clone ID: uC-tsrow189016a10b1
tgcgcgaacccggaagcctcgcttccgccgccgtcgccgccgctccgcaccgcgacgcagagctcgcccgtgctcccctacgcacggagctcccggctctcgtcggcgcagggatttgttcaccatggcccgcttgtacgttggcaacttggatgcccgggtgactgctggggaacttgaagatgagtttcgtgtgtttggagttttgcgaagtgtctgggttgcacgtaagccacctggttttgcgtttattgattttgacgacaagcgggatgctgaggatgcacttcgtgatctagatggcaagaatggatggagggtctgagctgtctcgcaatgaccg

SEQ ID NO: 7246 - DNA, 293 bp, Triticum aestivum
  Clone ID: uC-tsrow189016a11b1
tgatcatccctgataccaaagctcatcttcttctccttgaaatctttttgggtccacagatttggaggatgtcttgcaactgcggatcaggctgcagctgcggctcagactgcaagtgcgggaagatgtaccctgatctgacggagcagggcagcgccgccgccgaggtcgccgccgtggtcgtcctcggcgtggcgcctgagaacaaggcgggacagttcgaggtggccgccgggcagtccggcgagggctgcagctgcggcgacaactgcaagtgcaacccctgcaactgt

SEQ ID NO: 7247 - DNA, 210 bp, Triticum aestivum
  Clone ID: uC-tsrow189016a12b1
tgtacgcgtccgagctcgcgctgcgccgccaaagctttgaagtcgctactagggtttatcgcctccactcatcaagcgcctagctagggttttgcttggtccagtcgggagagggaggcgagatgctgcgtcggaacacgcggcttcgtcgggagtacctctaccggaagagcctcgaggggaaggagcgtcagcactacgagaagaagc

SEQ ID NO: 7248 - DNA, 197 bp, Triticum aestivum
  Clone ID: uC-tsrow189016b02b1
ccccgccgcctcaagatgcagatctttgtgaagaccctcaccggcaagaccatcaccctcgaggttgagagctccgacaccatcgacaacgtcaaggccaagatccaggacaaggagggcattcccccggaccagcagcgccttatctttgctggcaagcagctggaggatggccgcaccctcgctgactacaacat

SEQ ID NO: 7249 - DNA, 366 bp, Triticum aestivum
  Clone ID: uC-tsrow189016b04b1
tgtctccctgctgctcctctctccagttcgtcttcctccttcggatcgagaccttggagcctgctccatggatctgttcatggagccgaatggcgactcggaacagaggattagccatgggcagacgggggatactggtgctgcgcggcctatagagtcccaggcttctattagcgtcgccgagggtgacattcgccgtgtcggagacctctgtagcggcggcggaaatgcgtgatttgttggcgaggacccgctctgcaagtgtgttcggaggctacgagcggatggacacacatagtaagggatcaggaaagcccctccggagcgcgagttcaaccataaccggaaaagtgcgcttgaactatc

SEQ ID NO: 7250 - DNA, 339 bp, Triticum aestivum
  Clone ID: uC-tsrow189016b05b1
tggacttctgcgagagggtggttgaatttgcctattggattaacattggaacacgagatatacaaggcagcagcatcccttaggagctacagtcaggtttcaaggataaacccgagaaaatctattccacgtgcagtccttagaggagcaagtggacttgctatcttgacagttgtaaaagctggtgcatttcttacatacaaacttggaactggcttagtagttgctcgtaaatcagatgggtcatggtctccaccctctgctatagcttcagctggattaggatggggagcacagcttggcggtgagttgatggatttcatcatagtgcttcatggt

SEQ ID NO: 7251 - DNA, 295 bp, Triticum aestivum
  Clone ID: uC-tsrow189016b06b1
tgtctagctgtgatggagactatgtaacctcagtgactaaaatgtgcgcgggggttctaaataccattcaaaaactcatttctgaagttgacgagggatatatcttagatgatagatgtgtacgtgctgctcccaaacctgtgaaggatgatgcttcaagaagtaggtttctatcagaagaacagattcagccaaccgaatcatctgctgatcccactatcaattgtttctcatatcggtactacctatctaacatttgggcgaattacaacaggactagagatgctcttaagat

SEQ ID NO: 7252 - DNA, 153 bp, Triticum aestivum
  Clone ID: uC-tsrow189016b09b1
catctcctcttccacaaccggccaccgtcccgatctgaaggtctccgaccagatcagcctcctccccaccacggcgtgcggcgaggagtccccggatcgctcgccgtcacccagtgcggtgcagatctgggagtccgccctcaccaagcattc

SEQ ID NO: 7253 - DNA, 301 bp, Triticum aestivum
  Clone ID: uC-tsrow189016b10b1
tgcccgactctaatcaggtcatctaatcctgaaacagaagcacttcggaagagcagccaggcctactgtgctcaaccagcttgtgcagagccatcctgcatgatacagccatcgtgcacagcccccacaacatgctttggccctcggttcttctcgaagtcgaagaaagatcgaaagccaaagcctgaagttgtcaaccaggtccgcccatggccggagctcatggcagaacctagtgatgctcgatcaatgtcatttgttggcacacacgagtacttggcccctgagattatcaaaaggt

SEQ ID NO: 7254 - DNA, 405 bp, Triticum aestivum
  Clone ID: uC-tsrow189016b11b1
ctgggggaacccgacggagatggacgccgacgacaacaagtcgctggcgttcgagggctacgagacggtgaggatcgccaaggaggccgtggaggccgcgtgccccgacctcgtctcctgcgccgacatactcaccatcgccacacgggacgccatcgccctgagcggcgggcccttctaccaagtggagctggggaggctggacggcctgagctccacggccagcagcgtggccggcaagctgccgcagcccaccagcaccctcaaccagatggtcgccatgttcagggcgcacgggctcaacatgtccgacatcgtcgctctctcagcggcgcacaccgtggggctcgcgcactgcggcaagttcaggaccggggtgtacggcagcccggcggacgcgacgct

SEQ ID NO: 7255 - DNA, 273 bp, Triticum aestivum
  unsure (1)..(273): unsure at all n locations
  Clone ID: uC-tsrow189016b12b1
tgngcagcattgggtgagagacaaggagaagccaatcaggaagtgcgccggccggcctcacgccatggcttgtcacgtgaaggccattgtgtttggcgccgccgtcctggcagcatttgttctcgcgactgagggccgcgctgctcggaaggacctggggctgggcctcgacctcggcggcggcggcggcctcggggtcggcacgggcggcggtctgggagtcggcaccggtggtggcgtgggcatcggctaggaatcggtgtcggcattggc

SEQ ID NO: 7256 - DNA, 366 bp, Triticum aestivum
  Clone ID: uC-tsrow189016c04b1
ttttaccgatatggatggacagtagcactaccaagcaatgcagagaagtagaaaatgctgtcggaggagcattggagttatctaagctgacagggtctcgtgcctatgagagattcactgggccccagatacggaagatctaccaaacagcaccccatatttatgaaaataccgagagaatatctttggtgagctcatttatggcatctatccttgttggatgctatgcaagtattgatgaaactgatggtgctgggatgaacttgatggatataaacaagaggacctggtcaaaagctgttttagaggcaactgctcctgatcttgaacagaagctgggaaatctggcaccggcacgtgcagctg

SEQ ID NO: 7257 - DNA, 388 bp, Triticum aestivum
  Clone ID: uC-tsrow189016c05b1
tgcaacccctcctcccccgttctcctcattgtcctcgcgccccgccccgctccgctccgacggccaaccgctccacacaccactagcctgcctgcctgcctgcctgcctgccgccaaggcaagatggtgaagatctgctgccttggggctggctatgtaggtggcccaacaatggcggtcattgccctcaagtgccctgacattcaggtggttgtggtagatatcaccaagtcccggattgatgcctggaacagtgacacactgccaatctatgagcctggccttgatgaagtcgtgaagcagtgccgtggaaagaacctcttcttcagcaatgacattgagaagcatgttagcgaggctgacatcatctttgtgtcggtaaacaccc

SEQ ID NO: 7258 - DNA, 358 bp, Triticum aestivum
  Clone ID: uC-tsrow189016c06b1
tcgtgcgagacttttctttccatccgcaggagatcccgacgagaaggcgaaggcgaagccggcggcgcaaccgaagcccctcatggcccgctcgtcctcgcagtcccagtcctccgtcggcggtgccggcgccgccggatcccgcccggccaccgccgggccccgcggcacgcccgccgccacggctggcatgcgccgccgacccggccgcacctcctcctccgcgtccggtggcggaggcttctccggcggcggagggaacaacatgctgcgcttctacaccgacgaggccccggggctgcgcctctccccgaccatggtgctcgtcatgtctgtctgcttcatcggcttcgtcacc

SEQ ID NO: 7259 - DNA, 170 bp, Triticum aestivum
  Clone ID: uC-tsrow189016c08b1
cgcacgcacgcacgcacacagccgccaccaccccccaccggcccacctcgcgcccgctttgccctgctctgcgcgcacgcgcactagcccatcgctcctcacagccgcgcctactgccgtgctgaccatgaaccgcccgacgccggcgcaccacaggggcatgccgccgc

SEQ ID NO: 7260 - DNA, 349 bp, Triticum aestivum
  Clone ID: uC-tsrow189016c10b1
cttgcgcgcctaagtcaaagccgcctcgtcggcggcgcggacgatggaaaccaaaccggaggagccgagggtggtgacgctgcggccggtggaggccacgccggagtccttcgcgcccttcgggcaggtcatcgccgcctcccccgacggcgaccagttcggcccccacgacgcccagctcgacctcaaccgcggcatccctaggttctacatcatgagattggagagcaggccgctcaggttctcgaccatcacccaccacgccagcgtcacgcagtgcctgggctccatcggcggccaggactggtacctcggcgtggccaagccttccgtcgtggacgagcacggt

SEQ ID NO: 7261 - DNA, 250 bp, Triticum aestivum
  Clone ID: uC-tsrow189016c11b1
tgggcatcgatcagcgcgcgcgcgcgcacagacttcgataatcatcgtcggcttccgagcgagaccggtccaatcttccaagaaaacgccggaggggatgagggaggaggggctgcggatggcggaggacgcgccgggcaccaccggccggccgcggtggctgacgcgcgtccgcacgctcggccggggcgcgtccggcgccgtcgtgtcgctcttcgcggccggcgacggcgacggcgacgagctgctc

SEQ ID NO: 7262 - DNA, 466 bp, Triticum aestivum
  Clone ID: uC-tsrow189016d04b1
tgttccagctagctacctagctacgggtacagcagctcagtcgcgatggctcacatcctgggcatccactcacttgtcctcctcctcctcctggcctcttcgtcggcgtctaatgacatcgtgcttggccggaaggccggcgcggctgtggaggcacggccagcaccggggaagtacgcggtgatcatggatgccggcagcactggcacccgcgtccacgtcttcaggttcgacaagaggatggagctcgtcgacgttggcgacgacattgaggtcttcgccacggtgaatccgggactgagctcgtacgccggacggccacaggacgctgccaactccatcatgcctctgcttgagaaggccaacaccgctgtgcctcggtcactcatgaggagaacacccattaaacttggggcgaccgctggactcagactcataggagacgagcacgcggagcaaattcttg

SEQ ID NO: 7263 - DNA, 263 bp, Triticum aestivum
  Clone ID: uC-tsrow189016d06b1
ttttggccgctacccacaggccatcggaagcttggtggctgtgttcctgtcatccttcgccacaatgtgcatcttcaccagtggcacgctctacgccattggcggcgtctgcatcaagccggtcctggtgctcgcgctgtggatcctctacttcctgttcccgctcatctcgctgccgctgctccacccgatccagatcatcatccgcgccgacgccgtccgcatgcagctgctggggttcatcatcgccctcttcgtctccg

SEQ ID NO: 7264 - DNA, 351 bp, Triticum aestivum
  Clone ID: uC-tsrow189016d10b1
tgcggacgcgtgggtcggaacgtggcctctgggcaggtgttgttcacgtcggaccagacactgatggacgagacgccgacgaccggcaacaagacagcggtcatggtagccgacaacgccgccaatcctatcacgtggatggtcaagttcgcggtggccatggtgaagatgggaggcatccaggtgctcaccgggaccgaccccggcgaagtaaggaaggtctgcttcgccaccaacaacgcgagctagaatccgtggagctgcatgtacgatgactaaacaaaagtgcacctgggcagctagagccggtgctcttagttggtttaatcctttttgttttggtttcattct

SEQ ID NO: 7265 - DNA, 420 bp, Triticum aestivum
  Clone ID: uC-tsrow189016d11b1
tgctgcaaatgatgtgatatacttggttgtttcaacatgagtacggctcagtaggaaggtcaaccgtggggaggcgcaacatagcgcggcctcagccaattaggtgtcctatctctttgcccattgcttctatggaactcttttgtttggcttatgaaggcacattcatcctgcaagtacaatcatgattaagagttagaatgcccctgcacatccgtttactttcttacattgattggtggttcttatgccttgtataatacgccttctcacataatagtttggtaaagaaagaatgaactcactcctgaattttgcactaattatatacttatttcactattaataatttgtatttgctatatcttttctcatgagttcgtcaagtacctttctaaacatgcttagatgcttttttgt

SEQ ID NO: 7266 - DNA, 406 bp, Triticum aestivum
  unsure (1)..(406): unsure at all n locations
  Clone ID: uC-tsrow189016d12b1
tgattgtttctccttgcagccctccttgcgctggcctcatggcaggccactgcctatgatcctagccctcttcaggacttctgcattgccgacatgaaggcgcctgtgcgagtaaatggatttgcttgcaaggacccaatggccgcaaccccggaagacttcttcaacgcagccatgctcgatcagcctagggatactaaggcgagcaaggtcaggtctaacgtcaccaacatcaatgttataaatttccccggcctcaacaccctcggcatctcgttggcacgcatcgactatggaccattanggtgtgaacacgccacacatacacccttcgtgccactgagctcctcacggtgctcgaggggacactctaccttggatttgtcacatccaacccaaacaggct

SEQ ID NO: 7267 - DNA, 196 bp, Triticum aestivum
  Clone ID: uC-tsrow189016e03b1
gagttcaaggaggccttcagcctcttcgacaaggacggagacggctgcatcaccaccaaggagcttggaactgtgatgcgctcgctggggcagaaccccactgaggcagagcttcaggatatgatcaatgaagtggatgctgatggcaatggaacgattgactttcctgaagttcctcaacctgatggcacgtaag

SEQ ID NO: 7268 - DNA, 339 bp, Triticum aestivum
  Clone ID: uC-tsrow189016e04b1
tccacgcgtccgggttgattggcagcggcggtggctgaaggtgaggcgctgctggagacagctgctgctacactggaggatgcgatgggtcggtgagggaggtaggttgaggacccatgatgccgacgccggcagccagtggaacactggtcagtggacgggtctcgtaagccgccatccttgttgacatatcatggagttgttcctggagggttgcaagttgctcttgatgcagcgcccatattttggtgtcaggaagcgtgaactgatactcggtggtaggttcggcaccagacatggaatctgataccaaattggaacaacccctgggtctgatgg

SEQ ID NO: 7269 - DNA, 290 bp, Triticum aestivum
  Clone ID: uC-tsrow189016e05b1
tgtgtaaccccgccttcgccatcgtcaacaaggccactggtctcgccgtcaagcactccctcggccagtcccacccggtgaagctcgtgccattcaacccggagtacctcgacgagtccgtgatgtggacggagagcggcgacgtcggcaagggcttccgctgcattcgcatggtgaacaacaatccgcctcaactttgacgccctcaacggcgacaaggaccacggcggcgtgcacgacggcaccaccgtcgtcctctgggagtgggccaagggcgacaaccagagctg

SEQ ID NO: 7270 - DNA, 245 bp, Triticum aestivum
  Clone ID: uC-tsrow189016e06b1
ttctgacttcaagactggcgacgccaccgtcgaatacgacgtctacgtcatgcactagcctgaaaatgctttgagggcttactttcggctatgctttgagatttgagcgttttctttgtcctacatatcggtgcatttacttgggttaattgtgcaagttgcaagaataagtggccctatgtgaaatagtatactctttttattagtggaacttgtttaacgcagaaaaaaaaaaaaaaaaaata

SEQ ID NO: 7271 - DNA, 362 bp, Triticum aestivum
  Clone ID: uC-tsrow189016e10b1
tcttagcaatccaatagaaaactaaatacatcaccagcatcaatggccaagtcacaggcattggctgcaacattgttgcttgtcctggtggtgtccctcgccgcaatagagagtgttcatggcgtttgcggcatgtcgaatgatgaattcaagctttgtcagcctgcagcggcagtgaataacccaacaggcagtccatctgccgagtgttgtgccgcgctaggaaaggcaaacctatggtgcatctgtcgctacaaaggcatggccggcatatggctgaaaatgtaccatattgacgcacgccgtgccatggcactgccaggcaagtgcggccttaccatgccaagcaactgcccttgatg

SEQ ID NO: 7272 - DNA, 423 bp, Triticum aestivum
  Clone ID: uC-tsrow189016e11b1
tgctccacgcgtccgcccacgcgtccgcggacgcgtgggacccggacatgggcgagaacttcgcatactactgggagacgcagcgctacctcgagtcagaggagctcgttgacagcatcttcgtcggggcgaccgaagacgccatctcgtactacgactccagctcgccggacggttcccactcgtcctcgacgccgatgggggcggccatgccaggggcggggatggggatgggcggcactggggcgaacaagaacatactgatggaacgcgaccgccgccgcaagctcaatgagaagctctatacgctccggagcgtcgtgcccaacatcaccaagatggacaaggccttcgatcatcaaggacgcgatcgagtacatccagcagctgcaggcagaggagcggcagatggaggcggaggtg

SEQ ID NO: 7273 - DNA, 351 bp, Triticum aestivum
  Clone ID: uC-tsrow189016e12b1
tcttccaattccatccccgtccccgtgatcgagcacacaactccaattccccaagcttaaccccatggccggctaccccccaccccccggctccggctacccctacggcgccgctggcggctacggagccccaccgccctccggccagaagccccccaaagaaggcaagacctcttcctcctccggccccgacccctaccacggtgctccgcccccgcagcagccttacggcggaggcggcggcggctacggagccccaccgtcctacggccagaagcctcccaaggaaggcaagacctcctactcctccggctccgacccctaccacggcgctccacccccgcagcagcc

SEQ ID NO: 7274 - DNA, 115 bp, Triticum aestivum
  Clone ID: uC-tsrow189016f02b1
attcagaaagaacaacagaaggataagaaggaaaatgcagtgcaagttaaggagccagaagcgcaacccaaaagtcagggaggcgcggcacaaagctcacaaagcaagaaaggcg

SEQ ID NO: 7275 - DNA, 148 bp, Triticum aestivum
  Clone ID: uC-tsrow189016f03b1
cttctcgatctagctagagccatggcgccgaccaagggcgaggggccggccatcggcatcgacctcggcaccacctactcgtgcgtcggcgtgtggcagcacgaccgcgtcgagatcatcgccaacgaccagggcaaccgcaccacgc

SEQ ID NO: 7276 - DNA, 304 bp, Triticum aestivum
  Clone ID: uC-tsrow189016f04b1
tctgtgattgatgaggtgaggactggcgcttaccgccagctcttccaccctgagcagcttatcagtggcaaggaggatgcagccaacaacttcgcccgtggtcattacaccattggcaaggagattgttgatctctgcctagatcgtatcaggaagctttcagacaactgcactggtctgcagggattccttgtcttcaacgctgttggaggtggaactggctctggccttggttcgcttctcctggagcgtctctctgttgactatggaaagaaagtccaagcttgggttcacagtttaccca

SEQ ID NO: 7277 - DNA, 353 bp, Triticum aestivum
  Clone ID: uC-tsrow189016f05b1
tgtcacacgaggcttgagagagagagagagagagagagagagagattaccatgtgaacaggcccttctttcccctgcttcgggccaagcttaccgcgacgacgatggcgaggctgctgcttctcgggttctccctgctgctgctcacggggctcaggcccggccgcgctttcctcgtcgcggaccctcagcccgacgtctcagacgacgtgccggcgctgctcgccttcaagaaggccatctacgacgacccactcgcgaggctgtcggactggaactccagcgacccggatccctgcctgtggttcggcgtcacctgctcggatttcgacgcccgcgtggtgactctggact

SEQ ID NO: 7278 - DNA, 359 bp, Triticum aestivum
  Clone ID: uC-tsrow189016f06b1
tggtgatgtctttccggaatctctccgtttggagttcgagaggacggcaagtcgaaggcgtcgatttcgagccaaattcacatgtccaaagatttgtggacggttgcaatcagatgagataccaattggtagcaaagatggcagtgcagttactgttgcggcggagaacattgtttttcacgatgcagcggtttctgagaaagtaacactgggttcatttgccggagactacgaccaagatgatgacaatgcggcagctttaggtgaataccttaagcgaccagtgcgcttggcgagttatgcatgggctcaaggaggaaggttttgcacagagcattaccccttgggcggcatatttt

SEQ ID NO: 7279 - DNA, 386 bp, Triticum aestivum
  Clone ID: uC-tsrow189016f10b1
tctcccacgcgtccgcccacgcgtccgcgagaagaagcgagatccagatcgagctgagctgagctgcccgggccgccggagctgagctgagctgctctgaccgccggaggcgaagaagaagaagaagaagagcaagaagatgaagcggaagacgcggaacaagatcgtggtgacggtgctgctgctgggggcggcggcggtgctgatcggcggcacgctggcgctgatcctgacggcgggcacctggaaggtgaagctcaaggagtcgcaggagaaggtgtgcaacaaggggtggggagtgctccggcaccaagtactgctgcaaccagaccatcaccgacttcttaaggtgtaccagttcgagaacctcttcgccaagcgcaact

SEQ ID NO: 7280 - DNA, 384 bp, Triticum aestivum
  Clone ID: uC-tsrow189016f11b1
tcttccacgcgtccgcccacgcgtccgtgtgatctgacaatggagttcaagaaaccaaaaagtaaatgcaatgctgctgcagctgcaaggaaccgtcatctttgtgagaaccttgcggacagttgctttcctattaatcaagggcattctgccagccgacttcatgaatttttcttgcgccaattctgtgatgctcatacttgcaatgggggctccaaacctttccccaaaggtggcaggaaacaaacaaacagattctacctggctctctgcatcttgacaatgctgcttttgcctgtgttctatctcatagtatttttacaccagagggaaatgaagaagggagatcaagttttcaaacgaatcggaaaacccgtgcacaag

SEQ ID NO: 7281 - DNA, 157 bp, Triticum aestivum
  Clone ID: uC-tsrow189016g01b1
ggcggggccgagctgccctacaacaccaccgaggacgccggcaacgccacctctttctccggctacccgcagacggacctcctcacgccgattgccaccgccggcgacatcacgcagatccaggcctcggtcggattggtcggcacgctcttcgccg

SEQ ID NO: 7282 - DNA, 322 bp, Triticum aestivum
  Clone ID: uC-tsrow189016g04b1
gcgtccgcccacgcgtccgcataaacgctcctgcaagcgagaccttcctgccactcccccgtgtggtcaatgtcatggtggccggagccgccccgacaccatcgcttcttgcggcgctgtctatccgtggtttccgtgtcacccacacttacggcctgtctgagacctatggcccgtcgacggtgtgcgcgtggaagcccgagtgggacgacctgccgctggaggagcgctcccgcctgcactgccggcagggcatcaggtacaccgcgctggaaggctggacggtggtgatcccgagacaatgatccctgtcccggctgat

SEQ ID NO: 7283 - DNA, 298 bp, Triticum aestivum
  Clone ID: uC-tsrow189016g05b1
cacgacagatttctgggctgggcatttaccctgctgtcgatcctttggactcgacatcaagaatgctttctccccacgttctgggtgtggatcactacaacactgcccgtggtgtccagaaggttcttcagaactacaagaatcttcaggatatcattgccattttgggtatggatgagctcagtgaggatgataagatgacggttgcttgtgcaaggaagatccagaagttcctgagccagcctttccatgttgccgaagttttcactggtgctccaggaagtatgtggatctaaag

SEQ ID NO: 7284 - DNA, 140 bp, Triticum aestivum
  Clone ID: uC-tsrow189016g06b1
tggacgcgtgggtttggttcgggcttcgggggaaaggtaaggccggggcggggaggaaggcccacaagccaatttgggattctttttcttcccttcaggcccgggattccggcccttggcggctggccgaacgggctggt

SEQ ID NO: 7285 - DNA, 364 bp, Triticum aestivum
  Clone ID: uC-tsrow189016g10b1
gccgcctgctccggggctcccaccgcggacaccattgcagacaccagctgcgcggccgaggcgattgtttgcacgacgtccatggcttcgcctcagggcaccaacacaactcctgatagagtcgaatcaccacaccgacgaagccttttcttgcaagaattcaagaatcagttccctgctgtcgcaattccacaaacaaatggcatgcatgctcccggtcgcaggtacgggtagcaaaatccccctttctatcaacctgggtatcagacctaccgatcatccgcttcaacccagaaatcatccgtccaaagccaaaccccaatcgtcagtccgaatttccaaaaccgcagcacgaatcgtgaca

SEQ ID NO: 7286 - DNA, 210 bp, Triticum aestivum
  Clone ID: uC-tsrow189016g11b1
ctccccaaccagcgaggaagaggaagaggaagcggatcgagccggcgagagcgagggcgaggacgatggcggcgctccggctagcggggaggagattttgcgaccgcgcgctcgggagatcagcgggcattcacgagctcaaggctgccaaggaattccccgacattgatcctgggcatctcaaggctgccaggaaacaccccaaacttc

SEQ ID NO: 7287 - DNA, 68 bp, Triticum aestivum
  Clone ID: uC-tsrow189016h01b1
cttgcaccaagagcttatttgttttgagcttccatcattgcattcatctttcttggatttgctccatg

SEQ ID NO: 7288 - DNA, 200 bp, Triticum aestivum
  Clone ID: uC-tsrow189016h02b1
tgcatacatcgactttgagaagctggaagatgccatttttgcccatagagccttgaatggggcagatttagggggcaaggaattgtgtgttgatttccagaggtccagaggcagagcggaacggttggaagcaggcaacttcaacagtagaggatcattgccacccggtgaaatgggagttggacatgcaaagggtttct

SEQ ID NO: 7289 - DNA, 159 bp, Triticum aestivum
  Clone ID: uC-tsrow189016h03b1
ttttatgaaggagcaggagatgtaaaggcaattgtaaattttgctctgtcgcaggtcaaaggtcttctcagagataggttggatggtaagacatcaggaggttcaagtggcaaaacctctggtggctcaagggagaaaaaaactgaaccaaatgaatca

SEQ ID NO: 7290 - DNA, 244 bp, Triticum aestivum
  Clone ID: uC-tsrow189016h05b1
gggcgctcctccccgcctccggcagcggcggcgccggcggcggggagcgcttgagcatcgacgacgcgctggcgctgcacgcgggggagttcgggcggtggcagctgtggcacttcctgctggtgacggcggcgtggacgctggaggcgatgcacaccatggtgatgatcttcgccgaccgcgagccggccatgtggtgccccgcgggggaccgggcggtgccgcgaccgctgcgccggcgccg

SEQ ID NO: 7291 - DNA, 261 bp, Triticum aestivum
  Clone ID: uC-tsrow189016h06b1
gctcttggttggttgatcaccaatggtgcaggtcttgcatcttaccccattgacactgtccgcagaaggatgatgatgacctccggagaggccgtcaagtacaagagctccttggatgctttccagcagatcctgaagaaggagggtgccaagtccctcttcaagggggctggtgccaacatcctccgtgccattgctggtgctggtgtgctctccggctatgatcagctccagatcctcttcttcggcaagaagtacggc

SEQ ID NO: 7292 - DNA, 271 bp, Triticum aestivum
  Clone ID: uC-tsrow189016h08b1
tttctcacgcgtccgccggcggcggcgcgtagaacaggagaaggagcaggcggcggcggtgcccgaagaggagaagcacggcgacctagcccgagctcgcaaccatggctaggggtttgaagaagcatctgaagaggctcaatgccccgtctcactggatgcttgacaagcttggtggagcttttgcccccaagccatcatctggtcctcacaaggccagggagtgcctgcctctgatcctcatcctgaggaacagactgaaatatgctct

SEQ ID NO: 7293 - DNA, 311 bp, Triticum aestivum
  Clone ID: uC-tsrow189016h11b1
cccgccgccaccgccggcaaccaccggatccggagaagaaagaggcagcgcccggcgaagcgaagcgggggaagagatggtgggcactccgtcctcgccggtggtgaacgtgtacccgctcgccaactacacgttcggcaccaaggaggccaagatggagaaggacacctccgtcgccgaccgcctcgctcgcatgaaggtcaactacatgaaagaaggaatgcgaacaagtgttgaagcaatcctattggtgcaagagcacaaccacccccacatacctgttgttgcaaattggaaacacattttgcaaa

SEQ ID NO: 7294 - DNA, 401 bp, Triticum aestivum
  Clone ID: uC-tsrow189016h12b1
gggcgccattattgcagagcttttttcacaccgacctcttttccctggctcaagtgaagcagacgagatatacaaaatctgtagcattcttggcacaccaaatcagcatacttgggctggaggactgcagctggcagcatctatcaattttcagtttcctcagtctggaagcataaatctttcagaagtggttcccacagcaagtgaagatgcgctgaaccttatttcgtggctttgctcatgggacccacgtaaacggccaaccgcagtggaggttttgcagcatcccttctttcagccatgcttctatgtccccccttcacttcgtttcagatcgaccggatatgcaacaacaccaccatcagttggggctaaaggagctatggaccagaagaatgcta

SEQ ID NO: 7295 - DNA, 382 bp, Triticum aestivum
  Clone ID: uC-tsrow189017a01b1
tccacgcgtccgcccacgcgtccggccacgcgtccggtggactccgtgtgggcggagcgaagtgggagccaacgccaagccagccgagcggactcctctcctcctcgcagcagttcgcgattcgcccccaaatccagcgccctccccgccggaatccggcgccgaatcttgcagagagcttgaaccgagctatggacaacttgtggcatctcggagatgagttccgtgggcaatcaaaggtggtggaggaccgccaatggtctctcatgacatcaaagctggctgagatcacaaagtcaaaggctgagaggatgaatgactttgagtatgcacggatgaacaccgtccctgatgtgaagcaatgggataagttatcctacca

SEQ ID NO: 7296 - DNA, 358 bp, Triticum aestivum
  Clone ID: uC-tsrow189017a02b1
ttttctttttactggcatggaacaaaacgcgggtccgaacgtggggtcggtgaggggcttcggcgtcatcgacaacatcaagacccagctggagagtgtatgcaagcagaccgtgtcctgcgccgacattctgaccgtcgccgtccgggacttcggtgtcgcccttggagggccatcgtggactgtcccgctggggagacgggattccaccaccgcaagtgcctcgctggcgaacagtgacctccctggcccgagctctagccggtcacagctcgaggccgcgttcctcaagaagaaccttaacacggtcgacatggtcgcgctctcaggcgcgcacaccatcgggaaggcccagtgc

SEQ ID NO: 7297 - DNA, 450 bp, Triticum aestivum
  Clone ID: uC-tsrow189017a03b1
ggcgtgttcatggacaacaccaggcttgccattgctgcgatcggcaagctcatgtttgcccagttctcggagctggtgaacgacctctacaacaacggtttgccttccaacctctccggcgggcgcaacccgagtttggactatggcttcaagggagctgagattgccatggcctcatactgctccgagctccagttcttgggcaacccggtgaccaaccatgtccaaagcgccgagcaacacaatcaagatatcaactctcttggtctcatctcctccaggaagaccgccgaggccattgacatactcaagctcatgtcatccacattcatggtcgccttgtgtcaggccatcgacctccgccatctcgaggagaatgtcaaggatgccgtcaagaactgcgtgaagatgacagccaggaagacattgagcaccaccaacaatgggcac

SEQ ID NO: 7298 - DNA, 167 bp, Triticum aestivum
  Clone ID: uC-tsrow189017a06b1
tcaacgtttcttaagagagctgcagttcgattcaggccacaattggtcaagactgtcactgccaactatagtaccaggaaacctctgctgtggcgcctattcaccttcaaaccttatcctgaatctaactggagatcttttaaggtgcgttgggatgagccgtcaac

SEQ ID NO: 7299 - DNA, 336 bp, Triticum aestivum
  Clone ID: uC-tsrow189017a07b1
acgcgtgcggtggctctgaatccacttaactattgactgagaccacgatggaaaccagagagatagttacatctgaaaccacgcagtgtgttgcatcagacgaggtccagagcaccatcttggcatccgatgctgttggtactttggatgacaaggtagatagtgacggtgaagacatcatcgatcatcacgtggatgaggacaggatcaccgaagtggagctgtggcaacaacttgaaaacgagctgtaccggaaaagggaaggggagaacaacatattggaagagatgactgaaagtaacatctgcgaggaagttggcggcagagctcaagatg

SEQ ID NO: 7300 - DNA, 416 bp, Triticum aestivum
  Clone ID: uC-tsrow189017a08b1
ttcccacgcgtccgctttttttttttttttttacaaagacggaacaccattctgatggaaacaatacatattatgtacagaattattcaggagttctttagccacatccaaatagcgggtggcagacatgcatggcgtagcaaatttagcaaatgcataagttatacagcaagcattttctgttgcggcttcgcatcttcgctgctgataccacaacgacgatggagcctagccgactactacggtactattgaagtttctttctagcgatacaccgaaaccaagatcgactccacgagggctgacgatcagaccagaacagagcctactcctccttcgaggcgtgcatggcggacaccgtggagaccatggagtcgacgccgcacttgttgcgcacgttggagcccctgcagatc

SEQ ID NO: 7301 - DNA, 485 bp, Triticum aestivum
  Clone ID: uC-tsrow189017a09b1
tctaagcagcaatggagtcgctgactctgcgcgcctcgccgtcgtcgaccgcctcgccgctgctccgcctgcccggccggcggcgcgcggcgtccgtccgcgtctccgcctccgcctccggcgccggcgagccggacctgtccgtgaccgtgaacgggctgaagatgcccaacccgttcgtgatcggctccggcccccccggcaccaactacaccgtcatgaagcgcgccttcgacgagggctggggcggcgtcatcgccaagaccgtgtccttggatgctggaaaagttatcaatgtaactcctcgctatgctcggctcagggcagatcctaatggatctaccaagagtccaatcattggatggcagaacattgaacttatcagtgatcgacctctcgagacaatgcttaacgagttcaagcaactgaagaaggaataccctgataggatactcattggctcaataatggaggaatacaacaaa

SEQ ID NO: 7302 - DNA, 369 bp, Triticum aestivum
  Clone ID: uC-tsrow189017a10b1
cacgcgtccgatctgctgcatcggagctggctacgtcggcggcccaaccatggctgtcattgccatcaagtgcccggcgattgaggtggtggttgtggacatctccaagccccgcattgacacgtggaacagcgacacccttccgatctacgagcccggacttgatgatatgttgtacaaggcttgcagggggaagaacctcttcttcagcactgatgttgagaagcatgtcgccgaggccgacatcatcttcgtctccgtgaacacccccaccaagacccgcggtctgggagccggcaaggctgccgacctcacctactgggagagcgccgcccggatgatcgccgacgtgtccaagtccgacaagat

SEQ ID NO: 7303 - DNA, 215 bp, Triticum aestivum
  Clone ID: uC-tsrow189017a11b1
ttcgtctttggacgcgtgggggcggcggtggagcacgcgaagatggtgaagttcctgaagcccggcaaggcggtgatccttctccagggtcggttcgccggccggaaggcggtcattgtgcgcgttttcgaggagggcacacgcgaccgcccctacggccactgcctcgtcgccggcctagccaagtaccccaagaaggtgatccgcatggactc

SEQ ID NO: 7304 - DNA, 310 bp, Triticum aestivum
  Clone ID: uC-tsrow189017a12b1
ttgtgccgcatggtggagatgtgctgcgccgagcacgacgcgcacgccgccgagacgcagttcctcacgcacaccgccggtcggatgctcgccacgctcgagctcagctccaccccaatcaacaccaagggctacgagacgctgctccgcctcgtggacaatacctgcagcgacagcttcgacctctacaacggcctcttcatgtacaacaagaactcgacggacctgctcaaccgcctcgagtccgtcatggactccgtcaaaaagaggctcttcgacggccctcacgaggtgctccggaagcagctct

SEQ ID NO: 7305 - DNA, 440 bp, Triticum aestivum
  Clone ID: uC-tsrow189017b01b1
tccacgcgtccgtctcgatctagctagagccatggcgccgaccaagggcgaggggccggccatcggcatcgacctcggcaccacctactcgtgcgtcggcgtgtggcagcacgaccgcgtcgagatcatcgccaacgaccagggcaaccgcaccacgccctcgtacgtcgccttcaccgactcggagcgcctcatcggcgatgccgccaagaaccaggtcgccatgaaccccatcaacaccgtcttcgatgcgaagcgtcttattggcagaaggtttgctgatgcccctgtccagagtgatattaagatgtggccgtacaaggttattcctggccccgcagacaagcctatgattgtagtgcagtcaagggtgaggacaagcagttctcagctgaagaaatttcttccatggtcctcatcaagatgcgtgagatcgctga

SEQ ID NO: 7306 - DNA, 305 bp, Triticum aestivum
  unsure (1)..(305): unsure at all n locations
  Clone ID: uC-tsrow189017b02b1
tccacgtgtccggctcccctacccacacccagacacaacaccacattggcgccgccacccaacgccccatctcccttggaggctcggaccttgccgccgngcccccccccccccccctacccaccccttgagcgaggaggaggtcggtaggcatccccagatctgttaagggattcgaactggagctctcgatcgctcacgcgccgggcacaacctccgtctgctcttattgctcgccggcgacgcgagcatggagcttcctccgtgctcgcttgggctcgggacaccgctgctagtcaagacac

SEQ ID NO: 7307 - DNA, 387 bp, Triticum aestivum
  Clone ID: uC-tsrow189017b03b1
tggcggtttttgccggatggcccgtggtggatcacagtgggctactcaggtccccgaccccggggacaacttctccggcatgccggtcgtcgacctctccagccctggcgcgccgcgggccatcgccgacgcgtgcgagcgcttcggcttcttcaagctcgtcaaccacggggtgcccgcggacacgatggacaggctcgagtcggaggccgtcaggttcttctcgctgccgcaggccgacaaggaccgctccggcccggcctacccgttcggctacggcagcaagcgcatcgggctcaatggcgacatggggtggctcgagtacctgctcctcgccgtcgacgccgcgtcgctctccgccgcctgcgccgtcccgtcctgcgcgct

SEQ ID NO: 7308 - DNA, 305 bp, Triticum aestivum
  Clone ID: uC-tsrow189017b04b1
tttgattctttgccagtctgccttgaagccaagccagtagaacgttctgcaggtgatatgattggactgggtggttccttttcaacaaaagaaaccgagattagatgtacaaaaggaacagaaactctttggtcagatcgcatctccggaaaagttactgtcttggctggtaatgcaaacttctgggcagttggctgtgaagatggctgcctgcaggtttacacaaaatgtgggatgcgagcaatgccagcgatgatgatgggctcctcggctgtttttatagattgtgatgactgctggaaatt

SEQ ID NO: 7309 - DNA, 211 bp, Triticum aestivum
  Clone ID: uC-tsrow189017b05b1
cccacgtttccgaccacacgtccgtcggcgccacgagggaccccggcctggtgaagaggatcggcgaggccacggggctcgaagtcagagtcaccggtattcagtacgccttcgcgccgtgcatacgaggtgtgcagagatccgaggtgggggcggtgctacgagagctacagcgaggaccgccggatcgtgcagtccatgacggagctca

SEQ ID NO: 7310 - DNA, 340 bp, Triticum aestivum
  Clone ID: uC-tsrow189017b06b1
ttcaccttatctcctacaccattgaccagacggcggggctcacctgcccccccttggccttccacatcgtcctgctggcttccccggttcttcctcgtttttgatctcagtcactcatgtcttttgaagtcagcgagggatccccttatttgctctcgcgctacttctggttcatatatcgcataaaattccgggacttcacttgatacaagtggatcatctggagttttgtgcgaatacttcctatcatgtgaatcagcggtagttggcttaattggcaagactcaaacttctctcatctgagttcagaaacatttgttgcttgagtctttggtgtact

SEQ ID NO: 7311 - DNA, 396 bp, Triticum aestivum
  Clone ID: uC-tsrow189017b07b1
tacatcatctcccccacctctctcccaaagccaagagctcaggagaagcaccggccatggagggcatggaggaggacgtgcggctgggcgcgaaccgctactcggagcaccagcccatcggcacggcggcgcagggcggcggcgcggacgagaaggactacaaggagccgcccccggcccccttcttcgaggccggggagctcacctcctggtccttctaccgggccggcatcgccgagttcctggccaccttcctcttcctctacatctcggtgctcaccgtgatgggcgtggtgggcaacccgtccgggtccaagtgcggcaccgtcggcatccagggcatcgcctggagcttcggcggcatgatcttcgtgctcgtctactgcaccgccggca

SEQ ID NO: 7312 - DNA, 411 bp, Triticum aestivum
  Clone ID: uC-tsrow189017b08b1
gtgaatgtgctaatggagtcaaagggtggcaaaaagtctagcagtagtagttccctgatgtacgaagcacgcctcggctacagcattgaagaccttcgacctgctggaggcgccaagaagttctctgctgcatactcgaactgcgcgaagaagccatcctgatatcgtttttggcatccccttctcgtagtttaggattgttatgcaattttattctgactcttttctcccaccaatctctctggcttgctgcttcacgataatcgaccagttctctagtctttctccctctgttcctctctgctctgctctctgactcgaactgcaacaatggctgccccgacctctgcgatcgggtttgagggctacgagaagcgcctcgagatcaccttcttcgaggcatcaatcttt

SEQ ID NO: 7313 - DNA, 400 bp, Triticum aestivum
  Clone ID: uC-tsrow189017b09b1
tcacgcgtccggttttggatactgtatataaggggctgctaatgaatggaacacttattgctgtcaaggtgttatctgtcgaatcaacacaaggactaatggagtttctgaatgaactgatgtcaatttccaacatatctcatggcaatcttgtcagcctttatggctattgtgtggaaggaaaccagaggatccttgtctacaattaccttgagaataatagccttgcacaaacacttctaggttctggccgcagcaatatccagttcaattggagaagtagagtaaatatttgccttggtatcgcccgaggattagcatacctccatgatgatgtcaatccccacattgttcatcgggatatcaaagcaagcaatatacttcttgataaggatctcac

SEQ ID NO: 7314 - DNA, 330 bp, Triticum aestivum
  Clone ID: uC-tsrow189017b10b1
ttgcaaggaaaaggagcgcggcttcatcgtcaagaaggaggaggcggcgaacgggacaccgacgtccggcaatggccgccggggccgcaagtacaggtacgaggaggacgacctggacgcggagaccgccaggagcagcaagctgatgatgccggacagcgaggagaccggcgcgcgcgagatgttcgacgaaataatgctggaggggtacgagacgtgcatgcgagggatagaggagctgcgcctcgccatggacagcgaggccaagaagaagaacgggaaggcggcgcgcgcgaagaaaagcgaggttgtcgacctgcgcaccatgct

SEQ ID NO: 7315 - DNA, 380 bp, Triticum aestivum
  Clone ID: uC-tsrow189017b12b1
tccacgcgtccgcccacgcgtccgcccacgcgtccgcccacgcgtccgctccagcacacaagcaccccagctgagctcgaagagcaatggcggaagcaggggaatggctgccgtgcgtctccacgctggcgtcctgcctcctcggcttcgcgctctacttctacgcgccctactggggagtccgcggcgtgccgggccctccggcgctgccggtcgtcggccacctgccgctgctcgccctccacggccccgacgtcttcggcgccctcgccaggaaatacggccccgtcttcaggttccatctggggaggcagactctgggtgatcgtggccgacccggaactgtgcaggaggtcggggtccggcagttcaagagcatc

SEQ ID NO: 7316 - DNA, 423 bp, Triticum aestivum
  Clone ID: uC-tsrow189017c01b1
cgcaactggttcgtccgtcgtcgcgtaccgaatctccaccatcccccccgcgcgccgccgcctccgcctccgccctcgacgatgggtctctgggatgccatgtaccgcgtggtgatgcgccgtaacggcgtgtacgtcaccttcgtcgtcgccggcgccttcgctggcgagcggctggtggactacggcgtcaacaaggtctgggagatgaacaacgtcgggaaacggtatcaagacatatcagttctggggcaaaggccggttgaggagtgaagacattgaagcccagatttcccatgatcttttaagtgaaattaggcaccttataaagctccatgttttggcattttcttttggcacaataatattgtaaaactcttgctgggtgttattcactctctctgagcactatggcacccatct

SEQ ID NO: 7317 - DNA, 437 bp, Triticum aestivum
  Clone ID: uC-tsrow189017c02b1
gagctgttccgcatgatggcggaggcggacgcggacggcgacggcttcatcagcctggaggagttcgcggcgctcaacgccacggcggccggcgacgacgaggaggacctgcggctggccttcaaggtggtcgacgcggacggcagcggcgacatctcggccgcggagctggcgagcgtgctccacggcctcggcgagaaggcgacggtgcagcagtgccggcgcatgatcgagggcgtggacaagaacggcgacggcctcatctccttcgacgagttcaaggtcatgatggcctccggcttggccgccaagatggcctgacccgtccatcctcttgttgattcagcgatttcgtccacgcctccctccctccttcctctcgcgtgccgtgcggtgcggtgcggattaagtgcgaattaagtgtacataattcaagg

SEQ ID NO: 7318 - DNA, 172 bp, Triticum aestivum
  Clone ID: uC-tsrow189017c03b1
cccacgtttccgcgaattctgtacattaggttgtcctttttcatttgttacaagcagctatatgtcatgttagattcgtttgagtgagtaatggaacttttaggtctacttggcatgccactgcaacttactgttaactcttactgcagttatatttcatgttagattggac

SEQ ID NO: 7319 - DNA, 340 bp, Triticum aestivum
  Clone ID: uC-tsrow189017c04b1
tcgaccttcgagccccccttctccacctcgtcactgtggtcacctagcttgagctcgagcgaaggagcgactcggcaggacgccggggggcaggggcagcagccagccgcgcctggccccgtgctctgcaggcgcccatcggcctcgacccggccgacggcaggaggagctcgagccgaagccgaggagcggggccttgatccggacttgactgcctactggagcagctggagagaagtggtggatccgacggggctggaatccctcatcaccgggcgtggaggatgtatgactcgcgaaggaggtagcagattgagcaaaatggagtggcctttcccat

SEQ ID NO: 7320 - DNA, 340 bp, Triticum aestivum
  Clone ID: uC-tsrow189017c05b1
tgaaatacacaacacgtacatcattcagagctagtcgatcggcaatggcaggtcaggccgagaaagtgttcgtccccaccgacgacgagctgctccaggcgcagtgcgacctgtggcgccacagcctctgctacctcacgcccatggcgctccgctgcgccgtcgacctgggcatccccacggacatccaccggctacggcggcgccgcgtccccgtccgagctcgtcgccgccctgtccctgcccgcgtccaagctgccgttcctcgcccgcctgctccgccagctcgccaccgcggggcgtcttcacctccaccgacgccgtaacgtaccggcttaac

SEQ ID NO: 7321 - DNA, 401 bp, Triticum aestivum
  Clone ID: uC-tsrow189017c06b1
ttgaggacctcgtccccctccagcccgtggggcgcctcgtgctcgaccgcaacgtaggcaacttcttcaacgagaacgagcagctggccttcggtccggggctcgtcgtgcccgggatctactactcggacgacaagatgctgcagtgcagggtgttcgcctacgccgacacgcagcgctaccgactggggcccaactacctgatgctccccgtcaacgcgcccaagtgcggcttcaagaacaaccactacgacggcgccatgaacttcatgcaccgtgacgaggaggtggactactacccgtcacgccacgcgccgctccggcacgccgagccggacagcttccccgtgcccacgcgggccgtcgtcggaaaaagggagaagacgaggatcaagaaggag

SEQ ID NO: 7322 - DNA, 311 bp, Triticum aestivum
  Clone ID: uC-tsrow189017c07b1
ttcgtcgccgcccatcgcgcacagaaaccacgctccaagacaccaaaacccaccgatcccccatggagaacggcgacgaaaccctcgtctcccccgccgccgccgcctccgtggaggtcgagaaggctgcgcccaacggagacgtcgcgggcgaggaggtcaccctcgccgacgccgtccaccccgccaagtcctacgccgccgtcgccgccaacgccgagatcgaggacctccgcgccaccaagctcgacctcgaggagcagctcgccaacgccagccaggagaacaagaccctcgccgcggaggcccac

SEQ ID NO: 7323 - DNA, 361 bp, Triticum aestivum
  Clone ID: uC-tsrow189017c08b1
ttgcaaatcaccgggtggttctattgtatgatgtccagacgcataatgttgatatgcagcttcctgataactccagcctgccaggttcaggccggggtgtacaacccattatacatttcagtccttcagatgatatgttgctgtggaacggggtcctgtgggatagacgaagtcccactcctatccatcagtttgaccagttcacagactattgtggcggtggctttcatccagctggaaacgaggtgattctaaattcagaggtgtgggatctgagaaagtttaagcttctgaggagtgtcccatccctggaccagacagtaatcaaattcaatggaggggtgatgttatctatgctatc

SEQ ID NO: 7324 - DNA, 381 bp, Triticum aestivum
  Clone ID: uC-tsrow189017c09b1
ttgcgtccttctgtttgaagaagcacgcgcagttctagagcaggagtggggggcctgtcatcctgatactcttggcgtgtacagcaacctggctgcgatctatgatgccatgggaagggtggaggacgcgatcgagatcctggagcacgtgctgaaggtgcgggaggagaagctgggcacggcgaacccggacgtggtggacgagaagaagcggctggcggagctgctgaaggaggcggggcggtcccggaaccggaagcagaagtcgctggagaacctgttcgggtccggcggtgctgcgcggggtgccaagaaggacggcgccgggggcaggcggtggaccaacttcgggttcaggggctgagctgatgagaagaaaac

SEQ ID NO: 7325 - DNA, 322 bp, Triticum aestivum
  Clone ID: uC-tsrow189017c10b1
ttccaccaccaccgaggagtgtttcggaggaggcgggggagcgcgtggtgcgcacacgtatatgtaataattttagtgccgcaagatagggtcttcttctttggttcttgatagagttttctatggaatccggccgcctcattttcggttcggccgcgccgtgccgcgctgccggcggcggaggaggtcagatgatgctctttggcggcagtgggagcttccttggaggctcgccggtggtggccggcgtggaggacgggcggcgtaagaggccgttcttgacaacggtggacgaggagctccagatggacgaggagatgta

SEQ ID NO: 7326 - DNA, 378 bp, Triticum aestivum
  Clone ID: uC-tsrow189017c11b1
tacccacgcgtccgccacgcgtccgcccacgcgtccggcaatggcttacgatacgaagtccctgacagtccttattgttggccgcctactctgtgggttgggttctgcaagagctgtcaaccgacggtacattagtgattgtgtccctgcaaggatacgcatgcaagcttcagcaggattcgtaagtgcaagtgcacttggcatggcttgtgggccagcgctggctggtttacttcagtggagatttaaaatctacatggttacgttcagtcagtcgactctacctggttggttgatggcagttgcatggctactgtacttagtttggctatgcatctcattcaaggaaccaaatcgtgccactgaggcagatgatac

SEQ ID NO: 7327 - DNA, 394 bp, Triticum aestivum
  unsure (1)..(394): unsure at all n locations
  Clone ID: uC-tsrow189017c12b1
tacagcgccaccgcgactgcgccactccttgcgttccgagtgacagaggccatggcgctcgccacctcccaccaccgccacctcgtccgccccgccgccgcggcccctcgcgtgccgctgcgtcccctccgcttcgccgccccccgatctctcccgaggatttgttgccaatctatcaactcagctaacgtcttgggagcttcctcaatgacagctgacgacgcagttccacaaccagttgtactgatagaccaagactcagaccgtgatgcaaccattgtgcagctgagttctggagcatcgtttgggggcactacttgatacgatgaaggcactcaaggacctgngccttgatgtgacgaaggaagtgtggcaactgattcatctgtcacac

SEQ ID NO: 7328 - DNA, 297 bp, Triticum aestivum
  Clone ID: uC-tsrow189017d01b1
ttttgacgagcaggtggtgaaggatgggtaccaatggcggaagtacggacagaaggtgaccaaggacaatccgtgcccgagggcctacttccggtgctcgttcgcgccgtcgtgccaggtgaagaagaaggtgcagcgcagcgccgacgacaagaccgtgcttgtggccacgtacgacggcgatcacaaccacgcaccgtcgcccaagcaacaaggctctggtggcaggaagaggggcggcgcagccgtcctccacgtatcaccggcgccggtgcttgttcaggagcagcggaagca

SEQ ID NO: 7329 - DNA, 413 bp, Triticum aestivum
  Clone ID: uC-tsrow189017d02b1
gtcgggtacaggacggagtggctgaccagctgcgcggtgctctccagcaaggtggccgcgctcgccccccactccaccaacagccacctcgcgctggcggtggcggcttcgaacggggcggtgcttgacttggtccctgtgaagaccgttgatggcagcgctcgcagcctgccggcgcccctgcggatcgcagacctgtccccggcgcccatgcacggctcggagctgcgcgtggcgtaccagggcgtgcctggggcgtacagcgagaaggcgtccggaaaagcctacccgggctccgacgccatcccgtgcgaccagttcgaggtggcgttccaggccgtggagaactggatcgcggaccgggccgtgctccccgtggagaactcgctcggtggcagcatccaccgcaacta

SEQ ID NO: 7330 - DNA, 434 bp, Triticum aestivum
  Clone ID: uC-tsrow189017d03b1
tccacgcgtccgcctccgcctcccgcgctccatttcgcacctccaacctcctgctccgacctccaccgctgctgccatggcgcggccagggcactccacggcgtggctccccctcctggtgctgctcttcgcggcgggcgcggcggcgcagagcggctgcctctccgcgaccttcacggggggccgcacgttcctcaagtgcaaccagctgcccgtgctcggcgccagcctccactggacgtaccacgccgggaacggcacggccgacatcgctttccgggcgccgtccggcgccgacggtgggtcggctggggcatcaaccccggcagcagcggcatggccggcagcaacgtgttcatcgccttcaactccaggctgcaccgccgtaacctcacggagtgctaacggcgtgggaggggcgtgctgatcccgct

SEQ ID NO: 7331 - DNA, 460 bp, Triticum aestivum
  Clone ID: uC-tsrow189017d04b1
tctccacgcgtccgcggacgcgtgacccacgcgtccgccaaattccctcccaacttctctacctctccggcctccacccaggagagccctaagccggaagcgccttacccttaagctctcttgacctctccccatggcgtccgcgtggtgcctcttggcgccggccgccaccggcgcggcgccgggcgctctcggcgtctccgcctccgaatccagaggcgtcttcgccgcgcgggcggcggtccctgagaggacgcggcgcaggtgggactcgctcgtggtgtgcgtggcccccgacgaggagaagattacgcggcgctcgcccctcgatttccccatcgaatgggagaaacctaagcctgggaggagacctgacatcttcccaaagttcagccctatgaaaacaccattgccccatccattaccagctgatgatcctctggatgatgatgaggaagaa

SEQ ID NO: 7332 - DNA, 432 bp, Triticum aestivum
  Clone ID: uC-tsrow189017d05b1
ttgctgttgaatgggccgtgtttggttgttttttcaatagtggtcaagtttgcagtgcaacttctcgtctacttctccatgagaaaattgcagagcgatttttagatagactagttgaatgggcaaagaacataaaaatctcagacccactggaagaaggttgcaggctgggttcagtcatcagtaaagggcagtatgaaaagattaagaagttcatctcgacagcaagaagtgaaggtgctacaattttgcatggtggtgaccgaccaaagcatctcggaaaagggttctttattgaacctacaattataacagacgttagcacatcaatgcaaatttggagagagggaagtctttggaccagtcatctgtgtcaaagtattcaagacagagagtgaagctgtagagcttgcaaatgatacccactatggc

SEQ ID NO: 7333 - DNA, 391 bp, Triticum aestivum
  Clone ID: uC-tsrow189017d06b1
taacacatcaggaatacacaagagaaaagaagacccaacggagctgaaatcaaatggcatcctccccttctttccttctcctcgctgctcttcttgccttggtctcatggcaggccgttgcctccgatcctggcccgctccaggacttttgtgtcgccgacatgcaatcaccagtgcgtgtcaatggatttgtctgcaagaacccgatggaggtcaacgctgatgacttcttcaaggcagccgccctcgacaagcctagggtgaccaacaaggttggatccaacgtcaccttgatcaatgtcatgcagattgctggactcaacaccctcggcatctcaatcgcgcgcatcgactatgctcccttaggccagaacccaccacatacgcaccc

SEQ ID NO: 7334 - DNA, 431 bp, Triticum aestivum
  Clone ID: uC-tsrow189017d08b1
gtgcaaggtggtgatggcaatggagagcgatggcgagcgagcgagcgagcaatcaggcaaagcaaccttggcgacggctccatttggatatttggatgggtcgagccgtcgacaacggaagataagctcggagcaactgggtgctgcaatttggcctggaatgatagttcctcctctctccactgctcggtgcaactcgcccaagtggatcaaagcgaaactgtgccagtatcggatcgtcgtggttccttctgagtcgtagggttatattttgtcactgtcagagtgcgtgtggtaaaaattacaaactcgtgaatcgtgatcgagcataatggaacttgtgaaactttacaagcatctgtggagagaattccgggagtgaattgttaccccatttgttctttgatcaatgaatgtttcccattggcgtc

SEQ ID NO: 7335 - DNA, 329 bp, Triticum aestivum
  Clone ID: uC-tsrow189017d09b1
tttcagagcagagtccgaactctttagcctgaagacctgatcacagagaaaacagtcgtgtgcaagatggtgaagcttgcatttggaagcttcggcgactcgttcagcgccacgtccgtcagatcgtatgtcgcggagttcatcgccaccctcctcttcgtgttcgccggcgtcgggtccgccatttcctacgggcaactgacgcagggtggcgcgctagacccggctggccttgtggcgatcgccatcgcccatgccttcgccctcttcgtcggtgtggccatggctgccaacatctccggcggccacctgaaccccgccgtcacgtt

SEQ ID NO: 7336 - DNA, 372 bp, Triticum aestivum
  Clone ID: uC-tsrow189017d10b1
tgccacgcgtccgcccacgcgtccgccacgcgtccggagctcacgacgtcccttctcggaacgtccaacgttcgtgcgttctccgccgccaatcttcccgtggaagccccgggcacgctggcgctgcgggggaggtacaacgtgacggctgcccgaaggctctccaagtcatcggagatcgtgacctgccacgacttgaagtacccgtatgcggtgtactactgccacacatccaaccccaccgccgtgtacgcggtgacgatggagagcatggaaaggggcgcggcgccggcgacgatggaggcgctggccgtgtgccacctcgacacgtcgcagtggagcctgaagcacccgttctttgcgctgacaacg

SEQ ID NO: 7337 - DNA, 398 bp, Triticum aestivum
  Clone ID: uC-tsrow189017d11b1
ttcccacgcgtccgctcctgcagtggatcaggtcattgaccaccgcccgatgcggcgtcggactagcggatccacgctgctcctccacctcccgaccaatgcccccggcccgtcctgctgctcacctcctcctcacatatgcatcaacaaaacatggcagccgctgcagtccacatcgttcaacagtagcaggtcaactcctccaaggtcacacaagctcgccgccaaaagcccacggtctattgagccagagatggcactggacgctgccgtggccggtcatctggatcggagccaccaacccacgtccgatagaggggggctggtagcagccccgttgaggggattgggcactatctgcagctacaagtggcatcgacctgcagctgcgggagcgt

SEQ ID NO: 7338 - DNA, 293 bp, Triticum aestivum
  Clone ID: uC-tsrow189017d12b1
gggggcgcaccggacaccgcgcgacgtgcggtgctcttccggccactggaccctacctccggctgaaccgtttccagggttggcaggccgttaagcagaaaagataactcttcccgaggcccccgccggcgtctccggacttcctaacgtcgccgtcaaccgccacattccggctcgggaaatcttaacccgattccctttcgggggatgcgcgtgatcgcgctatctgccggggttaccccgtcccttaggatcggcttacccatgtgcaagtgccgttcacatggaacctt

SEQ ID NO: 7339 - DNA, 367 bp, Triticum aestivum
  Clone ID: uC-tsrow189017e01b1
ttcgtatccaggcatcgatcagcgcgcgcgcgcgcacagacttcgataatcatcgtcggcttccgagcgagaccggtccaatcttccaagaaaacgccggaggggatgagggaggaggggctgcggatggcggaggacgcgccgggcaccaccggccggccgcggcggctgacgcgcgtccgcacgctcggccggggcgcgtccggcgccgtcgtgtcgctcttcgcggccggcgacggcgacggcgacgagctgctcgcggtcaagtcggccggggccgtcgacgcgcaggcgctgctgcggcgggagggcggcatcctggcctcgctctgctccccgtacgtgctcccctgcctcggctctcggt

SEQ ID NO: 7340 - DNA, 428 bp, Triticum aestivum
  Clone ID: uC-tsrow189017e02b1
ttatgatggttgctgccagctagatattcagtactcaatctcagcgagttgcaagttcactacaacaatgatagatctagagatttcacaaatccatctttgcccacagagcaacgcccaagatcctctcagcttggttataatgatcctagcctttttggtttccaacagcctggagctgcatatggacaggctgcagtgattgctgctgcatttggcggaacattgcctcctggagtgactggtaccaatgatcgctgcacacttatagttagcaacttgaacagtgataaagtcgatgcggataagctcttcaatctattttctatttatggaaatatagtgagaatcaaggtactccgcaacaagccagaccatgcccttgtccagatggctgatgggcttcaggctgagcttgctatacacta

SEQ ID NO: 7341 - DNA, 330 bp, Triticum aestivum
  Clone ID: uC-tsrow189017e03b1
ctcctccttccgcccccctcgctctccatcccctccgggccatcgccgtctgaatccttcactagggttagggtttacgtaacgaacccgcgccatggctaccttcacttaccaggtgagcgcgatggctggcgcctccccgtcgtgctctctcttcgtgagccggcggcggccggcggtcatgcccctgcagatgcgggttgctcgtggcgggaggccgcgcgggttggcgatgcaggtgacgagcgagaaggtggtgggaatcgacctgggcaccaccaactccgccgtcgcggcgatggagggccgcaagccgactgtgatcaccaa

SEQ ID NO: 7342 - DNA, 373 bp, Triticum aestivum
  Clone ID: uC-tsrow189017e04b1
ttgtcgtcttgggcatggacgtcgtcaagaacatcgagaaggtgggctcccgcagcggcacctgctccaagcaagtcgtcatcgccgactgcggccagctctagatccgtccgcccgccggtcgcctgtcgtcgtcgccccgtgtcccgtgtcgtcgatctaaataagagagtcgtgtgtcgtgtcgtgtcttccccttgtccgtccgatgagatctccgtggttggtttaggagggttttaggtggactcttttggccgctggatctgtgtccggcggccatggttatcttcctgtgtctgctgctatctcactgtttgaatgagatgaactccgctatgaattatccataatttgtgctcgttggcttcac

SEQ ID NO: 7343 - DNA, 422 bp, Triticum aestivum
  Clone ID: uC-tsrow189017e05b1
tcacgcgtccgggcacagatgcggttttcctctctcttatacgtgcattcagctggaatcccgctacatttcttcatgcatacacatgccttccccttgcccaagcaacaagacaggctgctaccgcagttttgcaggacattgctgattcgggagttctgtttgcactgttgatgtgtgatcacaaggttattagtcttgtgggagcacaaaaggcaactttgcatgctgatgatatattactacttgcaaatttcatattgtcctccgaatcttttaggacttcggagtctttttcacccatatgcttgccaagatacaatcctatggccttcctatacgcttatgttcatttttttgatgaaaatacttacttgactcttcttacccgagatcagatgccttctttgatttgaaagatt

SEQ ID NO: 7344 - DNA, 325 bp, Triticum aestivum
  Clone ID: uC-tsrow189017e06b1
gccagtttcacaaagattctgctcatcatgcacctcattgctttcatcgccctcacaatctttcttggagtccaggcttcttcccacccgaatcctacctacaagcccttcgcccacttcattccgctcgcctcttctgtgatattatctattatcgctgcctgcttttggactatccttgctgtcactaatcctgcaaaagccatcaaaacatctctctggacagctcctgtttccgcacttggctgcgatgtagtcatactccttgtcggtgacggcgaagcccttggcatcggagtgctcatagtgtgatcgccattgcagc

SEQ ID NO: 7345 - DNA, 318 bp, Triticum aestivum
  Clone ID: uC-tsrow189017e07b1
tggccgccgccgccacctccacccgctcctcacctaccccggcggcgaccccccagggacaccccgaatggcgacggcggtcacggcgtccgtgacggcggcgacccgcttcacgcgcctggcgggcgtcgccctccggcgcagcagctgccgcccccacaccgccgtgcgcttccagcgcccggggctcaccaccaccgcgctcctcaggcccaccgagctcaagcccaaggaccagggccagcccgagacgctcgactaccgcgtcttcctcgtcgacggcgccgaccgcaaggtgtccccgtggcacgacgtgcc

SEQ ID NO: 7346 - DNA, 368 bp, Triticum aestivum
  Clone ID: uC-tsrow189017e08b1
ttggcgaagcacccgcagattgacgtgccgaacctccaggtgatcaagctcatgcagagcttcaagtctaaggaatatgtcagggagaccttctcgtggcagcattactattggtacctcaccaacgatggcatcgagttcctgcgcaacttcctcaacctgccatctgagatcgtgcctgccactctcaagaagtctgccaggcctcctggccgccctcttggctctggcccacctggtgaccgcccaagggggccacctcgctttgagggtgacagacctaggtatggtgacagggatggctaccgtggcggtcctcgtggtgcacctggtgactatggtggtgagaaaggtggagcccctgcaga

SEQ ID NO: 7347 - DNA, 341 bp, Triticum aestivum
  Clone ID: uC-tsrow189017e09b1
tccacgcgtccgcccacgcgtccggcctcaaggcctcgctcaagcggctcaacatggagtacgtggacgtcgtgtactgccaccggcccgacgcgacgacgccgatcgaggagacggtgcgggccatgaactgggtgatcgatcaggggtgggcgttctactggggcacgagcgagtggaccgcgcagcagatcaccgaggcctggggggtggcgaaccggctcgacctcgtcgggcccatcgtcgagcagcccgagtacaacctcttctcccgccacaaggttgagtctgagtttgtacctctctacagtacttatggcattgggttgactacatggagc

SEQ ID NO: 7348 - DNA, 403 bp, Triticum aestivum
  Clone ID: uC-tsrow189017e10b1
ttcggacgcgtgggtggcgatatttctgctattcctggaatttcagctgctcttgaggaaactataaaaaatgctattgaagactcaataacatggccagtaaggaaagtcattcctatagtacctggggactacagtgatctggaactgaagcctgtcggcacattggaagtcaagcttgtgcaagcaagagatttgacaaacaaggatctgataggaaaatcggatccttttgccactttatatatccgaccattgccagacaaaaccaagagaagtaaaacaattaacaatgatctcaatcccatttggaatgaacacttcgagtttattgttgaagatgctgatactcccagcgtgacagtcaagatttatgacgatgacggtattcaagaatctgatc

SEQ ID NO: 7349 - DNA, 456 bp, Triticum aestivum
  Clone ID: uC-tsrow189017e11b1
gcgcctcgcgctcctcttcttcgtcttcgtcgccgccaccttcgccttctgggaccgccaatcgctcgtcagcgagcacgagtctgagatttcccgattacgaaatgaaataaatcagttgcatggtcagttaaggaaggctggtgttctactggaagaaaatccagcaactgaaattcccagaaaagatcttgtagagattgatcctattaataatgaaaggagggaaaaggttaaggaggctatgctccatgcctggaattcctatgtaaagtatgcatggggaactggtatgagcttcagccacaatcaaagaactggtgttaatagctttggcggtcttggggcaacccttgtggactctctagatacactgtatataatgggcctaagagatgagtttcagaaggccagagactgggtggcagagtcattaagctttgacaggattatgac

SEQ ID NO: 7350 - DNA, 471 bp, Triticum aestivum
  Clone ID: uC-tsrow189017e12b1
tgggtttcttcggtgctgatgcaaggtgtttgttgtatctgagaattcagaatatgggttctcggtttccatcccaccaattaagcaatgggctttatgtctctgggcgacctgagcaaccaaaggagaaggctccggttgtttgctctgcagctatgccatacactgggggtgacatcaagaaatcaggagaactagggaaaatgtttgatctccatgctgagaagtcacggaaatctggccctttgggtaatcaaccttcaaggaatacttcatttggtggtgctgcttccaattctggaccagtatctagtgctgcttctcgatccaactactctggctctatttcagcagcggttcctggcactggaggttcggcaagggcaaaatctaattctggaccgctcaataagcatggagaaccaaaaagagatcctctggccctcagtcaggaggagtgaccccaatggc

SEQ ID NO: 7351 - DNA, 344 bp, Triticum aestivum
  Clone ID: uC-tsrow189017f01b1
ttccacgtgtccggtccgtccgtccgtccgtcggcttaaaccctagacgagccgcccctcctccgactcgccgccgccgccggttgccatggagttctggggccttgaggttaagcctaaccagtccgtcaaggtttcacctgatgatgaccacttcctccatctctcccagggggcccttggcgaagtcaagaaggatgacaaggcaaccatgttcgtcaagatcggcgaccagaagctggccatcgggaccctctctaccgacaagttccctcagatccagtttgacctcgtcttcgagaaggagtttgagctggcacacaattccaagacatccagcgtct

SEQ ID NO: 7352 - DNA, 356 bp, Triticum aestivum
  Clone ID: uC-tsrow189017f02b1
atagctgtcccgatcctcgatctgttctcaaccctccctccgtccgtcgcagctccagatttccttccccatggctccgatcaagatcggcatcaatggtttcggccggatcggcaggcttgtggccagggttgcgctccagagccccgatgtcgagctcgtcgccgttaacgaccccttcatcaccaccgactacatgacctacatgttcaagtatgacactgtccacggacagtggaagcaccatgaagttaaggtgaaggactccaagacccttctcttcggtgagaaggaggttgcggtgtttggctgcaggaacccagaggagatcccatgggctgctgctggtgctgagt

SEQ ID NO: 7353 - DNA, 442 bp, Triticum aestivum
  Clone ID: uC-tsrow189017f03b1
ttcccactcgtccgcggacgcgtgggtgcctggcccaagagcttagcctgctctgtgaatttgatagtttaaagacacaggaacttcttgataggccttgcagtggcatcaatggcttagtcgcatcttttgttgcacgactaagggaggagaatccttctcgtgagcatactattgtaagaactgcacaaaaacttaagccattcccttttaacaagttctcagcaaatggctatcatgatttcctgccgtcgcggctgcgtcccaagttccaggatgttgatagcgatgagtctgcttcctctgaggttctctgcctgatatgtcgaagtccattcagtgaatcagaactccagaattttgaaagcacaaggcgcaagtctcagaagaaaattgatctgtatactgcttattgctgtcaaagctgtcatttccagattct

SEQ ID NO: 7354 - DNA, 359 bp, Triticum aestivum
  Clone ID: uC-tsrow189017f04b1
accaccgtcattactactagaggaagcttcaactgttgtgctcttgctctctagctagtagtggttgctatcggtgctactaccgccgccgtccaaaccctagccctgatgccgcagcaggaggtgcccgaccagatcgccgcagggtggctcgcggtggaggcgccggagcgaacggggagcctccagaggagcggctccaacagccgcctcaacgcgcaggcgccggaattcgtgccgcgggtcgcggctggtggttccaccgccacagccaccgccggcagtgattcgtgtgtttgcggtgccctcgcctccacctcgcgcggctttctttgcggctcccccgcctcccccgtcgt

SEQ ID NO: 7355 - DNA, 269 bp, Triticum aestivum
  Clone ID: uC-tsrow189017f05b1
ggacaaccagcgacagccgccacttcgtccagctccggccccgggaggatcgcttcgctgccaaatcgctcgtcgacggcgggatgggggaggcgtcatctccggcgatcgccaaggatgtcaccgagctgatcgggaacacgccgttggtgtacctcaacaaggtgaccgacgggtgcgtggggcgcgtcgccgccaagctcgagtccatggagccctgctccagcgtcaaggacaggattgggtacagcatgatcaccgacgcggag

SEQ ID NO: 7356 - DNA, 255 bp, Triticum aestivum
  Clone ID: uC-tsrow189017f06b1
gggggaggcgtcatctacggcgatcgccaaggatgtcaccgagctgatcgggaacacgccgttggtgtacctcaacaaggtgaccgacgggtgcatggggcgcgtcgccgccaagctcgagtgccatggagccctgctccaccaacaaggaccggactgggtacaggatgaacaccgacgcggaggagaaggggtccatcgtcccaggcaagagtgtgctgattgaaccaaccagtggcaacacaggcattgggc

SEQ ID NO: 7357 - DNA, 53 bp, Triticum aestivum
  Clone ID: uC-tsrow189017f07b1
tgttatcattcccattctgataggactgctaacaatccatatgaacaaaagag

SEQ ID NO: 7358 - DNA, 322 bp, Triticum aestivum
  Clone ID: uC-tsrow189017f08b1
ttcggacgcgtgggttctcctccccttccggttcgggttctggttcggttcgggttcggttcgagagagaggccgagtagctagcctagtctagggtttcggtagagaggaagtgagatccatggcggagacggagtaccgctgcttcgtgggcggcctcgcctgggccaccgacgacaacaacctccagcaggccttcagccagtacggcgagatcctcgacgccaagatcatcaacgaccgcgagacggggaggtcccgtgggttcggcttcgtcacgttcggcagcgaggagtcgatgcgccaggccatcgaggagatg

SEQ ID NO: 7359 - DNA, 324 bp, Triticum aestivum
  Clone ID: uC-tsrow189017f09b1
ttcccacgcgtccgccgaccacccccctctagctcggcagccatgaactgcggaaggggtcccgctccggcgaccatggtgcgctgcaggcagtgcagcgccagcgtcgccgcgccgcccggtgcctgtgccgtccagtgcgcgcagtgctgctgcgtgactcgcgtcggcggggctgggcgacagctcagtgtgatgcgccccatcccgaacttcggcggtggccgcggcaagaagcgcgccgtgctcgtcggtatcaagtacaccaagacgcgtgcctgcgagctgaggggtcccatcaacgacgtcaagtgcatgaggtac

SEQ ID NO: 7360 - DNA, 289 bp, Triticum aestivum
  Clone ID: uC-tsrow189017f10b1
tggaaccatgggtggaagcggctcacatgaggaggggcaacagctcaacatggcttgggtggcaattctgtgtcgctagtgtggcggggttgtcggctcggtcgacgcgtcccagaggaggcggtctgactttacgtcagggcagcggccccggaggagttggtggcggcggtcgtggtctgcggggggttgccctgttcagcttgggttgtgggtgactaagtcgtgcggcattgcagcttgagggagagcggtggtatgtcgggacggcggtcccggaaggtggtat

SEQ ID NO: 7361 - DNA, 262 bp, Triticum aestivum
  Clone ID: uC-tsrow189017f12b1
tgtcctcacaaggccacgggcagtgcgctggcctggagatgccttatcctgaggaacagactgaaaggtgctttcacctaccgtgaacagcaatacaatgcttatgcagagttatatcatggttgatggaaaggggcgcactgacaagacctaccctgctgggttcatggacatcattgccatgcccaagactggtgagaactacaggcttctttatgacaccaagggtggcttccgccttaactatacaagggatgaggat

SEQ ID NO: 7362 - DNA, 434 bp, Triticum aestivum
  Clone ID: uC-tsrow189017g01b1
tccacgcgtccgcccacgcgtccggctacccatctggtggccacgggtaccccccgcagcagcatggataccctcagcaaggctaccctcctcagcatggctacccaccgcagcagcatggctaccctccacagcagcatggctacccccctgctggctaccctggctcatctggtcacagtggtagccatggaggaggaggcatgggcatgggtggcatgctggctggaggagcagcagctgctgccgctgcttacggagcacacaagctttctcacggcggccacggtggaaggtggacacatgatgggaggcatgatgggcggccacggaggctacggcggcgggtacggccaccacggcggtaagttcaagcacgggaagcacggccacggcatgttcaagcacggcaagcatgggaagcacggcatgtt

SEQ ID NO: 7363 - DNA, 331 bp, Triticum aestivum
  Clone ID: uC-tsrow189017g02b1
cggacgtttgggcggacgcgtgggtgattgagaggtccaccaaccttgactggtacaagggcccaaccctccttgaggcgcttgaccagatcaacgagcccaagaggccgtcagacaagcccctccggcttcccctccaggacgtttacaagattggtggcattggaactgtgccagttggccgtgttgagactggtgtcatcaagcctggtatggttgctacctttggtcccactggtctgacaactgaggtcaagtccgttgagatgcaccatgagtctctcctggaggcgcttgccggtgacaacgtcggcttcaacgtcaagaatgt

SEQ ID NO: 7364 - DNA, 389 bp, Triticum aestivum
  Clone ID: uC-tsrow189017g04b1
gagatccccatccggcgcccgtcccagcagcggagggggcgcagcagcagacgacgacttcgccttctactactctttcttccaggacgccgccgccgcgtcgccgctcccgctcgcgctcgacggagccgccatgcctaacaaccgccggaggaagcgcggagtggacgacgactccgccgcggcgcccatcaaggacggtagcaacaacggaaggaagcgctccatcgccaccataataacttcgctcgccgcgctcgaggccgagggccacgccgacagcgcgggggccgccgacgcctcccgccgcgagctcgcgctcttcgagtccaacgccgataacaagtcgcaggccatgatggactacttcgccaagatggagggcagct

SEQ ID NO: 7365 - DNA, 424 bp, Triticum aestivum
  Clone ID: uC-tsrow189017g05b1
cccacgcgtccggcacctttgaccaaggatgggcagcagggatctcggcagctgctatacaaggtctgttagagctgttggtagagggtggcgcagacaatgtgaaccaatgctttcttgaagctgcacgctatggaagcactgaactcgtccgcatcttacttcagattgctcaaaggaacagcttggacattgatgtggatctagcccttggttttgctgcccactacgggaaactcgaaaccatggggtgcttagttgaggaaggtaatactgtcgccttccttggccctttaatgcgggcagctgagcgtggatgctttcaagttgtggaatggtttgtgaaccgtggctgtcgggacatggagctttgcctggcccttactgctgccacctctagtagccaggttgaagttgctgccta

SEQ ID NO: 7366 - DNA, 343 bp, Triticum aestivum
  Clone ID: uC-tsrow189017g07b1
ggaaccctcaattgccgccgccggccgaccctcgtccctcccatccccctcgccgccgccgagggccgctcccgggcaaagcccgggcagggccggcggcggcggggcctctccaccgcgcgactccccaccccatggccatggcgcatgtctctgtctccagcggcgcttggtggcgtggtgctgcgattcgcggcggcggcggcctggcgcggtggctgcgggggtggtttgagccccgtacggtggtgctgcctgtggcagcgatggctgctggtttcgagtccgccccgatcctcttctttggatctggatctggccggcccgtactcggtcgtggctg

SEQ ID NO: 7367 - DNA, 443 bp, Triticum aestivum
  Clone ID: uC-tsrow189017g08b1
tttacactgcccagattctgatgagaagcttgatggtaaaggaaggaactttttacatattgctgttgagtataagaaatggaaagttgtttggcatttctgtggtaccccagagctggaaagaatggtgaatgtcatggattatgaagggaatacagctctgcatcttgcagtcaagaatgcagaccagatgatagtgagccttctgatggcaaataaaaatgtactgccaaatatagtgaacaacaagggcctcactgccttagatcttgcggtactggcaactgacaaagggatgagttatacactgaatccacaggtcattatacttcgctgtttagcatggacaggagctgtccttactccgcgtcgcctggatcatttcatagatgagttccacattgggaaagcctctgggaacgagctaaagaaattcagcaaca

SEQ ID NO: 7368 - DNA, 395 bp, Triticum aestivum
  Clone ID: uC-tsrow189017g09b1
tcacgcgtccgcggacgcgtggggtggtaatacaaagcgcgcagatgatgagtacagtgaattgggtagtctttctcccgaggtgtctgctatatatcttgcaatgcagcactctaagctggagtgtattgatgaacaaagtcaagattctatctcaacagatggcgggtgtgctgatcctgatgagactgaggagcttgatgagtttgacccttataccttcataaaggatttgcctgagttatctatggttgtacccaagtttcgacccgttcttcttccaaagcaaactcggagctgccctcgaaccacccttgtccttgatctggatgagacactggtgcattctactcttgagccgtgtgaagattctgatttcactttcccagttcatt

SEQ ID NO: 7369 - DNA, 415 bp, Triticum aestivum
  Clone ID: uC-tsrow189017g10b1
tatctcgtttctctcttcgcagcaaggattccccaagccgcaccagtgcccctctcaagttaatacacaacttgtggctccctcgcgtttcttaaatcatcagaaatggccatgccaagcctcatactaccgaaggaactaccatatgaatttttgaagaaaatcacggatgacttctcagatgaccgtaaaattagtgatagtccatttggaatactttataagggaattaatccagatgatggcaaagtgattgctgtgaagaaacttcaggaaaacgcaccgatgccacctaacaaagcatttgcgcaagaggttcagaatgttatggcgctcaaacatgataacatagtacagttggttggattctgcagtgaaacaacaaagagattggtgcagtttgataaaagatata

SEQ ID NO: 7370 - DNA, 426 bp, Triticum aestivum
  Clone ID: uC-tsrow189017g11b1
ttcgactgatgttgcagggcgtggtattgatattcctgatgtcgctcatgttattaactatgagatgcctagttcagttgatacatacacacatcgcatcggaagaacagggcgtgcaggaaagaagggacttgcaacttcattcttgaccctggataacactgatattttcttcgatctgaaacagatgcttactcagagcaatagtcccgtccctccagaacttgctaggcatgaggcgtcaaagtttaagccaggatcagttcccgatagacctccaagaagaaatgacaccgtctatgcatctcactgaagcaatctgccgcagaagaggtgggagatccttcctgggtataattcagggccaccaactgtgtcgagatttagtacttatgaggtacaaacatcataacaattgaacaatta

SEQ ID NO: 7371 - DNA, 429 bp, Triticum aestivum
  Clone ID: uC-tsrow189017g12b1
cccacgcgtccgcgctccctctcgcgggacggccaccaccccacactcacgccgagcggccgagccgtgcccacctcgcccccgtttgactccgacgcgcacgcgcacgcatggatgtgcggcagaggcagaggagggtggcgccgccggcagtgggccatgcgggggcgccccgggtgctgcaggcgggggacgcgctgccgctcccgatccggcacacgaacctcatcttctcggcgctcttcgcggcctcgctcgcctacctgatgcggcggtggcgcgagaagatccgctcctccacgccgctccacgtcgtcgacctcaccgagattctctccatcttcggcctcgtcgcctcgctcatctacctgctcagcttcttcggcatcgccttcgtccagtccatcgtctcgtccagcgacgaggacg

SEQ ID NO: 7372 - DNA, 243 bp, Triticum aestivum
  Clone ID: uC-tsrow189017h01b1
ggcgagcctcaccttgccgccggcgcccccgaacccccgccaggacgccatcgacctccacaaggccttcaaagggtttggctgtgatagtacaacagtttcaaatatacttgctcaccgtgactcaatgcaacgtggatacattcaacaggaatacaaaactatgtattctgaggaactttcacgtcgtatatcgtctggactcagtggaaaccacaagaaagcaatgtcgctctggattct

SEQ ID NO: 7373 - DNA, 315 bp, Triticum aestivum
  Clone ID: uC-tsrow189017h02b1
cccacgcgtccgcccacgcgtccgctccgacgaccaccaccgacggcggcgacgatgcaggcggcggcggcggcgacgcggcgccacctcctcgaccagcaccacctctccccggcctcctcggccgccatcgccgccttcagatccgccgcccagccggcgctcgggccccaagggttgggcggggcggatggcgcgaggtacatgtccgcgcgggcgccggccgtcaagggcgccgggcatctcgtccgcaagggcaccggagggaggtcgtccgtgagtggaatcggcgctacggcgtttggagctactgga

SEQ ID NO: 7374 - DNA, 355 bp, Triticum aestivum
  Clone ID: uC-tsrow189017h03b1
gggcgcctcgggcgtcgtctacaaggcgcgggaccgccgcacgggcgccaccgtcgccgtcaagcgcctccgcggcggcggcttcggcgaccacgacggcagccggctctccgaggacctcctccgcgaggccgcgtgcctcgaggcctgccgcggccacccgtccgtcgtcgagctgcgggccgcgcaccgtgacggcgcgggcggcgcgttcctcgtgatggagtacgtcgggcccagcgtggcgcaggtcatgcgggagcgcggccggcccttccccgaggccgacgcgcgccggctcatgcgccagctcctggacggcgccagggcgatgcacgacctcagggtcctgcac

SEQ ID NO: 7375 - DNA, 357 bp, Triticum aestivum
  Clone ID: uC-tsrow189017h04b1
ttggacgcttgggcatgcatacagggtcctctttgatgtggatggcaaccctaggttgtcatgttttggtttgatgaagaacagcagagatgggaaaagctacagtactaatttggctttcacacctcctgagtaccttaagacaggtagagtaatccctgagagtgtggtctacagcttcggtaccatcttgcttgacctcctaagtgggaagcacattccaccaagccatgcgcttgaccttatcagaggaaggaacatcaccgtgctcatggattcttgcttggatggtcacgtctccagttctgatggaacagaaatggtgcggttagcatcacgctgcttgcaatatgaagc

SEQ ID NO: 7376 - DNA, 481 bp, Triticum aestivum
  unsure (1)..(481): unsure at all n locations
  Clone ID: uC-tsrow189017h05b1
agctgaggctatcttttcagctgcatttagtgaacctgagaatggcctgtcaacagcccttaagttatcggctgaaggtaatggccaattggatgctattagtggaaatccacctgcgacagataattgtcagacaaatcaccatagctctgaatgggttgagctatttgttagagagatgatgagtgcctctgacataaatgatgcacgggctcgtgcatcaagagctttggaggttattgagaagtccatcatggagcggacaggagccgaggcagtgcaaaacttgcacaaggaaaataagatgctaaaggagcaattagcaatagctcttcgagagaatgctgttctgaagcgnggggttgcaatccaacacgagcgccaaaagagtttgatgataagacaangaggttcacaacctaagcaattgattttgcagtatcaggaacaactaaagactctcgagatcaataattatgca

SEQ ID NO: 7377 - DNA, 395 bp, Triticum aestivum
  Clone ID: uC-tsrow189017h06b1
gtgacgccaacctcgcgggaagcgccggcgtctgcgcgcgtgcgatcatgatgatgaggcgccagttatcggtctgcgtcctcctcctgctcgtgctcgcggggcagcagcaggcggcggccaagaagtacgccgccatcttcaacttcggggactccctcgtggacgccggcaacctcgtcgtggacggcatccccgagtacctcgccacggcgaagctgccgtatggcatgacctacttcgggtaccccaccggccgctgctccgacggccgcctcgtcgtcgacttcatcgcgcaggagctggggctgccgctgctgccgccgtcgaaggcgcgcaacgccacgttccaccacggcgccaacttcgccatcaccggggccacggcgctggac

SEQ ID NO: 7378 - DNA, 270 bp, Triticum aestivum
  Clone ID: uC-tsrow189017h07b1
tgcgcaggctaccccaaaaccaccggatagtcaatccctcggcgggccacgagcgcgagagaagcagcggcagcgatggagccggagggggtgcggcaccggatggtggaggtggccaagggggtgcggctgcacgtggcggaggtggggcccgagaacggttccgtggtgctgctcgtgcacggtttcccggacctctggtacggctggcgccaccagatggtcgccctggcggtccggggctatcgcgccgtcgcgcccgacatgcgc

SEQ ID NO: 7379 - DNA, 321 bp, Triticum aestivum
  Clone ID: uC-tsrow189017h08b1
ttggacgcgtgggccgccgccggcgctttcccatccccatccccaactagtgagcgtgaacccgatgtgaggcgcgcgaaatccctccgccatggagcatagtgacggcgagaccgccgctaagcgagccaagctctcctccagcggcagcgaggacctcctcagcgcgctatccgacgacgttctcattcacatccttctcaggctccgcaacaccgccgtcgccgctcggaccagcgtcctctccagccgctggcgccgcctctgggcccttctcccgggcctggactttctccccgacaccaacccatacagcatacc

SEQ ID NO: 7380 - DNA, 356 bp, Triticum aestivum
  Clone ID: uC-tsrow189017h09b1
tccacgcgtccgggatgttgctctcaagaagaggagaaaatactggtctatgaatacttgccaaacaaaagcttggatttcgtcatctttgatgagaataaaagagctttgctggattggacaaaacttgcagtaataattgaaggggtagcaaatggacttctctacttacataagcactctcgattgcttgtcatacatcgagatcttaaaccaagcaacattctcttggacagtgaaatgaatccaaaaatttcagatttcgggctcgcaaaaatattcagctcaaatgacaccgaaggagacattacaagaagagttgttggcacatatggctacatggcccctgagtatgc

SEQ ID NO: 7381 - DNA, 325 bp, Triticum aestivum
  Clone ID: uC-tsrow189017h10b1
ttccacgcgtccgtacaactacagctcaacacatcatttgcaccggtcgtccttgatcctcacagcaatggcctccaccgacagctggacccacgagattgaatcgccggtggccgcagcgcgcctcttccgcgccggcgtcatggactggcacacactggcccctaagctcgcaccgcacatcgtcgccagcgcccaccctgttgagggcgaaggcggcatcggcagcgtcaggcagttcaacttcacctcagccatgcccttcagcctcatgaaagagaggctcgagttcatcgacgccgacaagtgcgagtgcaagtccacc

SEQ ID NO: 7382 - DNA, 266 bp, Triticum aestivum
  Clone ID: uC-tsrow189018a01b1
tgtcccctgcacctccacctcccacctcttctgccgcagcctcgccggcggcaggacgctctccgccgccgcaggacactcctgctcgtccacctcctcctcctccgtcaagatggcgcgctcggcgctggacgaggtgaccgacaccggcgccttcgaccggacgccgtccaccttccggagcttcgtgtcgagggacgcctccgcccgcttccccgcggtggcgggcaggtaccacctctacgtcttctacgcctgcccctggg

SEQ ID NO: 7383 - DNA, 195 bp, Triticum aestivum
  Clone ID: uC-tsrow189018a02b1
ttttcggtggcttgcaatcgagtagctgatcctgccatacataacctattgttaacggagaagccgatgtcaattgccgcggctgtcaccggaaccgccaccgcggcggtgcatgcgcccgtgcaccacgcgccggaccacgcctatacgcagcgcacggcgccgcggcgcgagcagtcgccgatcaacccgagc

SEQ ID NO: 7384 - DNA, 235 bp, Triticum aestivum
  Clone ID: uC-tsrow189018a03b1
tttcacgttttcgcccacgcgtccgggcggccatgaggctgtaccacggccggaggcgcggcgaaggcgaggacgccggcaagatcgagctgctgcaggcttttcaggccgtggaggcggccgtgcggaggttcttcttcgcgtaccggcaggtcgtggcggccgtgtgtggcacggcggaggcgtcgggcaaccgggcgctgtttgcgccggcggaggggacggaccccctgtc

SEQ ID NO: 7385 - DNA, 343 bp, Triticum aestivum
  Clone ID: uC-tsrow189018a07b1
cccacgcgtccgcccacgcgtccgcccacgcgttcgcggacgcgtgggtccagttatgcaagcactttcagtttgattggccagtgaatcatacatctctgagtcctgacgggaagcttgttgtaattgttggggatgatcctaatggtttacttattgatgccaattcaggaaagactcttcattccatgaaaggtcatcatgacttctcattcgcatcagcctggagccctgatggccgaacgtttgctactgggaaccaagacaagacatgccgaatctgggacgcgaggaacctatcaaaagcagtccatgtattgaagggtaaccttggagccatcag

SEQ ID NO: 7386 - DNA, 304 bp, Triticum aestivum
  Clone ID: uC-tsrow189018a08b1
ttctctggttctccaactcggcctacatctacctctccgtctccttcatccagatgctcaaggcgctcatgcccgtcgccgtctactccatcggcgtcctcttcaagaaggagaccttccgctcctcctccatgctcaacatgctctccatctccttcggcgtcgccatcgccgcctacggcgaggccaggttcgacctccgcggcgtcgcgctccagctcgccgccgtcgccttcgaggccacccgcctcgtgctcatccagatcctgctcacctccaagggcatctcgctcaaccccatcac

SEQ ID NO: 7387 - DNA, 432 bp, Triticum aestivum
  unsure (1)..(432): unsure at all n locations
  Clone ID: uC-tsrow189018a09b1
tctcctctcgcccgcgtctttcctcctcgacccgccgccgccgccgccgccgccatggccgccgggacgaagaccgtcgactacgcggcggaaagagcgctcgccaaggacttcctcaccaatttcgccggcccgcacggcgagcccaagtaccagaacatcctgcaagacatcgcgaaccggaagatccgcgccgcccagatcgagctggacgacctgttccactacaaggatgtggacgaggagttcctgcagagggtcaccgagaacaccaagcgctacattggcatattcgccgagggccgtggacgagctcatgcccgagcccacggaggccttcgctgtggacgaggacagggacatcttgatgacgcancgcgtggatgaaggggctgatggaggcgctgacggcacagacccttacagaggatg

SEQ ID NO: 7388 - DNA, 313 bp, Triticum aestivum
  Clone ID: uC-tsrow189018a10b1
gagatgaccgtcgcctccgcctggatccacctccttgccggcgacctctttgctgcaagacaagtgtaccatgatggaatcaagaacaacatcgagaccaggcattcggttttgctgggcctgctcttctgccccatcgggatcgccgctcacgcgctgaccaaggtactcgcgggttccacaggtcgatcacactgacgaccgattgcctgtaggcaggctccccttgtttagatgtctcagatcgtgagggtcagatatatgaataaaattgatttggtgcaccatttgttctatatagatttcacattga

SEQ ID NO: 7389 - DNA, 422 bp, Triticum aestivum
  Clone ID: uC-tsrow189018a11b1
atatgagaggggagggatgcctatgagagatgccggtgcgtcacaaagaccaacaattggggcattggcttctgcacttgccaatacacccccagagacgcaaagaatgatgcttggcgagaacctgtaccctgttgttgatcagctggagcacgaccaggctgccaaggtgaccggcatgctcctggagatggatcagactgaggtgcttcacctgcttgagtcgccagacgctctcaaggccaaggttgctgaagccatggaggttctccgcagcgctcagcagcacaccaaccagtcccctgagcagcagctggcttcgctctcgctgaatgacggcctcatctcttcctaagctctacggcgacaatttttgcaccatatcaaaacttatctagactgaaaatgacttggctttattg

SEQ ID NO: 7390 - DNA, 131 bp, Triticum aestivum
  Clone ID: uC-tsrow189018b01b1
ctaccgccgcctcgctgcgctccaatccgtgccgccgccgcgtttcttggtccggcggctggttggcggggacggggggaggcgggggatgaaggggctgggcggcgggccgaaggtgctgctggtgcact

SEQ ID NO: 7391 - DNA, 71 bp, Triticum aestivum
  Clone ID: uC-tsrow189018b02b1
ctgctgcggctagcggggcgacggttgcagtggagagcgtggtggtggtgcacaacgtggccaaacggcac

SEQ ID NO: 7392 - DNA, 182 bp, Triticum aestivum
  Clone ID: uC-tsrow189018b04b1
tgccagccccgtgcccgtgcacgtcgaccacaccgccatcctcgaggcgccggagaccagggtcaccacgctcgacaacggcctgcgcgtcgccaccgagtcctcgctctcctcgcgcacggccaccgtgggcgtctggatcgacgccgggagcaggtacgagacggaggaggcggccgggg

SEQ ID NO: 7393 - DNA, 137 bp, Triticum aestivum
  Clone ID: uC-tsrow189018b06b1
ttgctctcacgctgctcgcgtgactccgagctccccggttcgtgaacgagcccgcccgggaaaaccgcttgagaaatggctgaggaggatgtccagcccattgtgtgcgacagtggcaccggaatggtcaaggcggg

SEQ ID NO: 7394 - DNA, 201 bp, Triticum aestivum
  Clone ID: uC-tsrow189018b07b1
ccctaaccctagtcctagcttagcttacttcttctcgatctagctagagccatggcgccaaccaagggcgaggggccggccatcggaatctacctcggcaccacctactcgtgcgtcggcgtgtggcagcacgaccgcgtcgagatcatcgccaacgaccagggcaaccgcaccacgccctcgtacgtcgccttcaccgac

SEQ ID NO: 7395 - DNA, 137 bp, Triticum aestivum
  Clone ID: uC-tsrow189018b08b1
ttcgtgcttttggctgacgtctcggggcagaacaccccgcaggacttcgtcaacctgcacaaccgcgcccgcgccgtggacggtgtctgtccggtggcgtgggacaacaacgtggccaggtttgcgcaggactgggc

SEQ ID NO: 7396 - DNA, 228 bp, Triticum aestivum
  Clone ID: uC-tsrow189018b09b1
tggggggtttccgtccatccgagctcttaaagctgctggtgaatcatctggagccgctaaccgagcagcagatgttgggattgaccaacctccagcaatcttcccagcaggcagaggatgcattgtcacaaggaatggaagcattgcagcaatcactggcggagactttggctggatctctgggttcctccgctggctcttcagggaatgttgcaaactacatgggtc

SEQ ID NO: 7397 - DNA, 446 bp, Triticum aestivum
  Clone ID: uC-tsrow189018b10b1
ggtggagcagcgggtcggcgctctcaccaagcagcggtggataccggcggttcgcgcggcgcggtggcggggaccagcggcagatcggccgtgcggtgccaggccctcgggctccgtcaaggttgctaaaatggataagctcaagggctctgcgcgtcttatgattgtttcagatctcgatcacacaatggttgatcatcatgacgaagagaacctgtctttgcttaggtttggggccctttgggagtctgtttactgtcaggattctcttcttgtcttttcaacaggaagatcacctactctgtataaggaattgaggaaagagaagcctatgctaactccagatatcactattttgtctgtgggctctgagataacttatggtgaagccatggtccctgatcatggctgggaggaatatctgaacaataagtgggacaggaata

SEQ ID NO: 7398 - DNA, 358 bp, Triticum aestivum
  Clone ID: uC-tsrow189018b11b1
gcgggagggcggctactgggtgctcaaggagaagtatcgcacgagcctgaacccgcaggagaaggtgaagctgggcaaggagcccatggcgctcttcacggagggcggcatcaaggacctagccaagctccccatggagcagatcgacgccgacaagctcaccaaggaggacgtcgacgtgcggctcaagtggctcggcctcttccaccgccgcaagcagcagtatgggcggctcatgatgcgtctgaagctgcccaacggcgtgacgacgagcgagcagacgaggtacctggcgagcgtgatcgagaagtacggcaaggagggctgcgccgacgtgacgacccggcagaactggcag

SEQ ID NO: 7399 - DNA, 353 bp, Triticum aestivum
  Clone ID: uC-tsrow189018b12b1
gaatcacaaggggagtcttgtccaccaagaaaacatggaattatacagaaagattaacctaattcgacaagaaaatgctgagttacaaaaaaagctctctgagacggtggcagcgactgaagttaaccgagattcaagaactacatacaattttgcagttgttgaagatgccaatgtttctgttgatcttgaactcaattcaccgcagcaacaaaatgatgttgagcatactgcgccccctaaactaggattgcaactacatccatgacgatcgtggggtatgggattactcttgttgttattattctcaagggatacaattcagagcagccagaatactcttggttgtaaag

SEQ ID NO: 7400 - DNA, 231 bp, Triticum aestivum
  Clone ID: uC-tsrow189018c01b1
actttccacgcgtgcgcccacgcgtccgcgttatctggatgcaggaaccgtgaaatggactaacatatatgaggaagagttgcaaaatttccttcaggagggggcactctccgagctaattgtcgcctactctcgtgaaggaccaaccaaagaatatgtgcagcataagatggtggacaaggccaccgagatttggaacgtcatttctcaaggtggttacatatatgtgtg

SEQ ID NO: 7401 - DNA, 288 bp, Triticum aestivum
  Clone ID: uC-tsrow189018c02b1
tgccacttagctatatatctacacgtgcacatatatacctacgcacggttccatttcggttgatgagctgagagcctgagactcgaccgaatctaggcgcctagatcgaagtgatcgagcatcacttgggcgcgcgctcgcaatggacagcagcagctggatccatggatactacggccccagcagcggcgccggcggcggtaacagcggcttcatgtgcggttacgccgacagctgcgtcgttctcgaagagctgcacaacaggaaggaggaagaggagcgcacgca

SEQ ID NO: 7402 - DNA, 286 bp, Triticum aestivum
  Clone ID: uC-tsrow189018c04b1
tcttctttctctctctctctcgccacagtccccgccagatttgttgcctcgcctcgcctcgcctcgcctccacctgtatgccgtcaacgcccccatggcgtcaaccgcaccacggccgccccgccgagccgcgaccttgacactcctcctgcccttcctcctcctttcctcctccccgtccctctccttcgccgcttcgccgccgccgtcgagccccgtcccgttccacgcgccgccgcggtgggtcgcgtgcgactccgacagcgcccccccgtcgtcgcaccac

SEQ ID NO: 7403 - DNA, 264 bp, Triticum aestivum
  Clone ID: uC-tsrow189018c06b1
tttaagttttgcagtggtgcatttgtagattggaagcatggtttgccactgacgtggataatatatctttgaaaaattgggatcaggaacatgttcttactggtggacatgggcttatggtgaatggctacgaccctgttatcaaagctctctctcgagatctagatgtccacctgaaccacagggttaccaaaatcatccagcggtataataaagtcatcgtatgcgtggaagacgggacaagctttgttgcagatgctgcta

SEQ ID NO: 7404 - DNA, 373 bp, Triticum aestivum
  Clone ID: uC-tsrow189018c07b1
gcgcagacccactcgtccggttgcattccagctcaggcgagcagcgaccacctttcggcgagggtagcagcgatggagggcaaggaggaggacgtgcggctcggagcgaacaagtactcggagcggcagcccatcggcacggcggcgcaggggtccgaggacaaggactacaaggagcccccgccggcgccgctgttcgagcccggcgagctcaagtcctggtccttctaccgcgccagcatcggcgagttcatggccaccttcctcttcctctacgtcaccatcctcaccgtgatgggctacagcggcgccacctccaagtgcgccaccgtcggcatccagggcatcgcctggtccttcggcggcatgatct

SEQ ID NO: 7405 - DNA, 251 bp, Triticum aestivum
  Clone ID: uC-tsrow189018c08b1
acggtcaccacggtcaccacggccgcggctctggtcacttcgaggtgcgcgagagcaggctcgaggaggacttcaacacccgcaccggggagttccacgagcgcaaggagaacttcgtcgtcagggccgatgactgagcttacacgtaacggagcacactacgatgtgtgtatatgtatgcatgtcagcagtatatgtatgtgtgaatgttgcgcacagtcgtatagcgtatgcaggcgtgcgtgcttggc

SEQ ID NO: 7406 - DNA, 299 bp, Triticum aestivum
  Clone ID: uC-tsrow189018c09b1
agcaagagtggttcgaataggaacctggaaatcgagttccaatggtggaacaaatgacagcatctacagaattaggcgcccgtgtaagttaaaatatataaagttaagagtggttttcttgtttcacatcctctgctaaatgttaccctgtttgtgcatcagtgtaaatagccggcagagaaagtcgttttttggttgttgttgttgtactttcttctgtgagataaaaacagatgagatcagttgttttttgtactgattgtaatggaccgaccgattcattattttttcgacgggat

SEQ ID NO: 7407 - DNA, 423 bp, Triticum aestivum
  Clone ID: uC-tsrow189018c10b1
tacgaaccaaccggcgcgaccgaatcaaaccgcgcaaccgtgcgcgcgactcctcgtgggggccgggcgggcgcgatgcccctggacggcggcggcggcggggcggcggtcatgttcctggcgtacgcggccctggccgtggcggcgctgcgggccgtgctgtcctacaagtcggtggcgcacgcggtccgccggctgtggcggtgggcggacgagtgggcgcaggcctaccagtactacgaggtgccgcgcttcgtcgctggcggcaacgacggggccgagaacccgctcttccgcaaggcggcggcctacgtggcgtcgctgccgtcgctcgaggacgcggacgccgcctgcgtgctctcctccgccagcaagagcaacgacttctcgctgcagctcggcccgggccacaccgcgcacgac

SEQ ID NO: 7408 - DNA, 372 bp, Triticum aestivum
  Clone ID: uC-tsrow189018c11b1
ttccacgcgtccgcccacgcgtccgcccacgcgtccggaactttccttatggcaggaagccttccgatctgtggaggatatccatggcttgatgagcttggttaagagaactccaaagccatctgtcctggtcgtatattatgccaagctgactgaaatattctggatatctgagagtcacctgtatcatgcatatgcatggctgaagcttttcaacttgcagaagagctacaacaagaatttaactcagaaggatctgcaattactagcatcttctgttttgcttgctgcactttctgttacaccatatgaccataaatatggtgcatctcatcttgagcttgaaaatgaaaaggaccgtagcttgcgtat

SEQ ID NO: 7409 - DNA, 196 bp, Triticum aestivum
  Clone ID: uC-tsrow189018c12b1
ttcgtctttggacgcgtgggttgtttttttttttttttttttttttttttttttttttttttttttttttttttttttttttttcaggaaaaactccaagggttttcatatgcatttatggggaactaaatcactcaaccgaaaaattttcatgaccgaaaaacaaaggaggcagtggtatatttgctccctggat

SEQ ID NO: 7410 - DNA, 243 bp, Triticum aestivum
  Clone ID: uC-tsrow189018d01b1
ttgacttgccttcgccgtcaccttcctccgcacgcgtttccaatccaagctagctagccaccgccgaggcgacccgcggtagctatataaagccgcggcgtcgccggcaagccgcaaacccaaaccaaccaccgcaaacatccatcgcgttcccggccacttctacaacctgctttgcttccgcggcgcgatcttgttttagctcggcctccatccccgcttggctccttgcgcaacagcttc

SEQ ID NO: 7411 - DNA, 437 bp, Triticum aestivum
  Clone ID: uC-tsrow189018d02b1
ttccacgcgttcgggtcgctcgcccaagcgcaactcaatcacccgcttctcttcccccaaattctcaaatcgcgagctcggaacacttgcaccctactcggataggatcggcgattcgcccccctagttcctcgtcgggaacttcagagagcttcagtacaagatgcaaaggggaaggggcgggagaggtggtctctttggttttggggacccttttcctgcttttggcggctttgtaccacctgggaaccttatgtccagtttctttcgggggtcaagtccctttgatgatcccttcttcaccaatccttctggttctttgattggacctagcctatttgagcaaagcatttttggttcaagcatgttcgggccacacacagctctaaatggaggaggcttccagcagcaaggtcctgaaccaagcaggccaaaag

SEQ ID NO: 7412 - DNA, 111 bp, Triticum aestivum
  Clone ID: uC-tsrow189018d03b1
atttacgtcctcagatctcgctctcgcctgcttgcgcagccgacggcgacagcagcatgtaaatggcggcgagcaacctcgagggtgtgctcctggggatgggcaaccccc

SEQ ID NO: 7413 - DNA, 400 bp, Triticum aestivum
  Clone ID: uC-tsrow189018d04b1
tctcacgcgtccgccagtatttggggaaccagtagcatctcaattatcaagagcggcaagagatgggatctctccccgtcccgagtgtgcaggccttggtggctgccaccggcggagacgatgtgccgctgaggtatctccggccagaggcggcagcagaagcggtcaccagcgacggcgacggcgacggcgaggcacagatccccatcatcgaccaccaaaggctgctgctggagctggaccatggtggcgaggagtctgcacgcctccacagagcctgccaagactggggcttcttccagttagttaaccacagtgtcccagacgatgtggtggagagcatgaaggccaacatccagcaattcttccagctacccgcagagacgaagaagcgattcgc

SEQ ID NO: 7414 - DNA, 210 bp, Triticum aestivum
  Clone ID: uC-tsrow189018d05b1
tttgcctttcgaatgggccgaccgccacgccactgagaaccgcatgcgcctccacgccctacgggtgatccgggagaggaagatggacggtgtggttgtgtttgcggatgacagcaacgtgcatagcatggagctgttcgatgaggtgcagaaggtccagtggatggccgcggtgtctgtgggtattcttgcgcacaccggaacagcaga

SEQ ID NO: 7415 - DNA, 421 bp, Triticum aestivum
  Clone ID: uC-tsrow189018d06b1
tggactgttgttagcatcccttgtggtcctactgcattagctgtcaaggaagcggcatggggacttgctcgctatgctgctattgctcaggacaatggtttagtgccaattgtggagccagagatccttctggacggtgaccatggcatcgagagaactcttgaggtggcagagaaggtgtggtcagaggtgttcttctacctggccgaaaacaatgttctgtttgagggcatcctgctgaaacccagcatggttacccctggtgctgagcacaaggagaaggcttctccagaagccattgcgaagaacaccctcacaatgctgaggaggagagtaccgaccgcggtccctggaatcatgttcctttccggcggacagtccgagctggaggcaaccatgaacctgaacgcgatgaaccagt

SEQ ID NO: 7416 - DNA, 313 bp, Triticum aestivum
  Clone ID: uC-tsrow189018d08b1
gccggccagccatggcgcccaggacgtccgacaagacggcgacgccgcccgctgccggggccgccgcgaccgggctggcgctcggagtcggcggcggcaacggcgggggcgtcggcacgcactaccgcggcgtcaggaagcggccgtggggccggtacgcggcggagatccgcgacccggccaagaagagccgggtgtggctcggcacgtacgacacggccgaggaggccgtccgcgcctacgacgccgccgcgcgcgagtaccgcggcaacaaggccaagaccaacttccccttcgcctccgcctccgcgcc

SEQ ID NO: 7417 - DNA, 298 bp, Triticum aestivum
  Clone ID: uC-tsrow189018d09b1
agaaggcattcccagaaacacaacatgacaataagcgacctgaagaatactctgcgcgtacttcagttccctcagttagtatgaggcacaataagtcaaattctgcctcttctgaggaagatagagaggacatggttcccattgcctggaggatgaagcggcggcagctggaagctcaacaaggcgacgccagttatgccgcgcagcagtccaaggtgtatccatctaccagcagttgttcccagcagcagtcgaaggtgtatccatctgccagcagctgttcccagcagcagttcgc

SEQ ID NO: 7418 - DNA, 430 bp, Triticum aestivum
  unsure (1)..(430): unsure at all n locations
  Clone ID: uC-tsrow189018d10b1
ctccgctcccctcctctctctcctccatcctccggtttctgatcgcgaccatgggaacccgcgggctcgccgtgctgctcctcgcggcggtgctgctgcagggcctcctcccggcctcggaggcggagggcctggtgcggatcgcgctgaagaagcgcgccatcgaccggaacagccgcgtcgccaagagcctctccgaccgcgaggaggtgcacctcctcggcggcgcctccaacaccctcccctccgaggaggagggcgacatcgtgtccctcaagaactacatgaacgcgcagtacttcggggagaatcggcgtcggcacgccgccgcagaagttcaccgtcatcttcgacaccggcagctccaacctctgggtgccctccgccaagtgctacttctcgattgcgtgctacctncacgcacgctaca

SEQ ID NO: 7419 - DNA, 474 bp, Triticum aestivum
  Clone ID: uC-tsrow189018d11b1
cggacgcgtggcggacgcgtgggcgcgacgtcgcgtccctgctctctccaccccgtcagcgatctcgggcgttggttttcgaggtattgtggagagctcttcaatttcatccggctctgttcttctgagcaaagggtgagaagaatctttcgccggattgtccccaaagatgccaggaatcatagtggatggagttgtcacagaggagattcagcatgaggtgggttcctctcaaaacaaggagaatttgacggccccaaccatggcgccaagcatgcagagtgaggcacttgagatgcacgttgagaattctggtgccggggagccctcgattgagcagctctacaacaacgtgtgtgagatggagagctcaagtgagggcggcggatccccatcacgcgagagcttcgggtcggatggggaggaatcaaggattgactctgagcttcgccaccttgttgctggggagatgga

SEQ ID NO: 7420 - DNA, 333 bp, Triticum aestivum
  Clone ID: uC-tsrow189018d12b1
tatcacatgttacaagcgttcaacaccggcaacctagctctctaccaagagctttgtggggttcacaatgctgctcttagtgcacagcctgcattggtgcagaatgaacagaaactgcttgagaagatcaatattctgtgtctgatggagataatcttcagccggccatcagaagatagaactatcccattaagtgttattgccaagcagactaagctttcaaccagcaaagtggaatgtcttcttatgaagagcctctcggttcatctcatagaaggaatcatcgatgaagttgacagcacggttcatgtttcgtgggtccagcctagagta

SEQ ID NO: 7421 - DNA, 249 bp, Triticum aestivum
  Clone ID: uC-tsrow189018e01b1
tttactcgtccgggcgaatcttcttggcgatggctggtaagcagggccgcaagaaggcgaggagcccccccggatgccctcagctgcgtccgatcggcagcaccgtctccggatcgaagaagcctgcggcggcgacggttccttcgtgcaagtaccacctgtcggaggcgtctgtccaggcggtcctaaaccacaagagggtgcctttcgtcattggggactacttcgacgacctgacccccgaggagc

SEQ ID NO: 7422 - DNA, 363 bp, Triticum aestivum
  Clone ID: uC-tsrow189018e02b1
ttctgctatcaaaggcagatactggtcctgaggggcagtatagcactttgcaggttcttgtcaatattttggagcatcctgaatgccgagctgattacaacttgacaccccggcaaacaattgagccagtcattaccttactgaattcatctccaccagctgtgcaacaattggctgcggagctcctatctcatcttctcctggaagaacaccttcagaaggatacagtagcagagcaatccatccctgccctcattcaaattctctcatcaggtttgccaaatttacagcagagagctataaaagctctcgctaatcttgcattagcctggccaaatacaattgcaaaggagggtggtgtgt

SEQ ID NO: 7423 - DNA, 368 bp, Triticum aestivum
  Clone ID: uC-tsrow189018e03b1
tttggattcgtgggtccgcacccaagcttgggcaccaatcttccgcactctccccttgccgccgggatggacgtgcagatgggcgagccgcaggcggtccctgctcccgccgccgtagaggcggcgccggccccctccaccctccaacatctgaaggagatcgccgcggtgatcgaggcggggtcgctctccaaggaggtccgccggatctcccgcgccgtccgtctcaccgtcgccctgcgccggcgcctcgccgcccgagacgtctcggccttcctcgccttcgccctcccggccaacagcgacgcatacgcccgcctcactcccctcctccccaaggaagatgaagctgagatggatgttgatgc

SEQ ID NO: 7424 - DNA, 205 bp, Triticum aestivum
  Clone ID: uC-tsrow189018e04b1
ttcggactcgtgggcggacgcgtgggtcggttgccgtcaccaagttccttgacgatttggccaagattgatttccccggtgccaagctggtgagcgacgcggtggccaagtccggcaccacgcccctctccccggccatcgtcttcatcttggacaaggttgcgcctttcgtccccgcgcccaaggaggagcccaaggccgagcc

SEQ ID NO: 7425 - DNA, 260 bp, Triticum aestivum
  Clone ID: uC-tsrow189018e05b1
tctccgaccagcgtcccacccaacgacccagcgtcgacctacctcctaccctcatccatccacccattgatccatcgattgatttggttggattaattgatccgccaccgccaccaccaccgccgtggagaaaggagggatggcggcggcggcgggcaggggcggggggccgaggcgcacgacgcgggtgggcccctacgagctcggcaagaccgtcggcgagggcagcttcgccaaggtcaagatcgccaaggacaccc

SEQ ID NO: 7426 - DNA, 456 bp, Triticum aestivum
  Clone ID: uC-tsrow189018e06b1
tttgagagcgttggagacattccagatgctgaggtcaaaccaccagataatgtcttatttgtttgcaagctcaacccagtgacacaggatgaagatttatatacaatcttctcgcgttttggaagtgtgacatcagctgaaataattcgtgacttcaagactggggatagtttatgctatgctttcattgaattcgaggaaaaggaggcatgcgaacgtgcatattttaagatggataattgtctgattgatgatcggaggatccatgttgattttagccaaagtgtttcaaaattgtggggtcagttcagacaaagtaaacgaaatggaaataaagatggttgcttcaagtgtggtgctccagatcacatagcccgagattgtgaccaggatggtgagcagaaacctaaagccccaaattatgttctgaaagatgataacactcaacgaggcggg

SEQ ID NO: 7427 - DNA, 502 bp, Triticum aestivum
  unsure (1)..(502): unsure at all n locations
  Clone ID: uC-tsrow189018e07b1
tggtttcctactaactaaccagtaaacagagagctcgctctccgtgaatgatgtcgaggaagaagaggaagaagaagaagcagtgtggagcacgctgctgctacctggtcatgctctcagcagtgtgaatctccagaagcatgcttgccgtgccttcttccgggtgcaccggaggctggcatgtgagcaggggtgcttcagtgacgcacaagaaaaaaggcaagtcttatcggcaagggaaggctacgcctttcttccaggtctccctctctccatctaaatctgtgtttggaggagggggctacggttagttcacccaccggtttactgtgtccttgtgagttgtgatcattatcatgcactcgtcagttgcttgacatgtatggtgtcgttcttgaattttcagctacatataatggtcngttgtgtgagtgaatggagttgtgttcatgtgtcggtctgtgtgtcgactgtcactgtgagtcaattagctaaaagaagt

SEQ ID NO: 7428 - DNA, 496 bp, Triticum aestivum
  Clone ID: uC-tsrow189018e08b1
gacatgatctgcgaggcgctcggctccgcggtggccaaggaggacaccatgcttcgcgcggccatccccgtgcgccagcgcgtcgccgtctgcatctggcgcctcgccaccggtgaaccgctccgcctcgtctccaagcgcttcggcctcggcatctccacatgccacaagctcgtcctcgaggtctgcggtgccatcaagtccgtcctcatgccgcgtttcctccagtggcccgacgaggccgccgccggcagattcaaggagggcttcgagagatccttcggtgttccgggggtcatcggagccatgtacaccacgcacatccctatcatcgcgcccaagatctccgtcgccgcctacttcaaccgtcggcacacggagcgcaatcagaagacatcctactccatcacgctcagggggtggtcggccctgaccgcgccttaccgacgtctgcatcggctggccgggctccatgccggacgatcaggtgctcgag

SEQ ID NO: 7429 - DNA, 491 bp, Triticum aestivum
  Clone ID: uC-tsrow189018e09b1
tgtttccttggacgcgtgggctcgccgagaaatctcctccgatcgaagcgaagccaaggctctctcgtcctcctccccaagatgcagatcttcgtgaagacccttaccggcaagaccatcacccttgaggtcgagtcctctgacaccatcgacaacgtcaaggcaaagatccaggacaaggagggcatccccccggaccagcagcgtctcatctttgctggcaagcagctcgaggatggccgcacccttgcggactacaacatccagaaggagtccaccctccacctggtgctcaggctccgtggtggcatgcagatcttcgtcaagaccctcacgggcaagaccatcacactggaggttgagtcctcggacaccatcgataacgtgaaggccaagatccaggacaaggagggcatccctccggaccagcagcgcctgatctttgctggcaagcagcttgaggatggccgtaccctggctgactacaacat

SEQ ID NO: 7430 - DNA, 377 bp, Triticum aestivum
  Clone ID: uC-tsrow189018e10b1
tccacgcgtccgcccacgcgtccgcccacgcgttcggtcggcgagcacgtcgacgtcaaggtgaacggcgccgtccacaagggcatgccgcacaagttctaccacggccgcaccggccgcgtctgcaacgtcaccaagcgcgccatcggcgtcgagatcaacaagcaggtcggcaacaggatcatcaagaagaggatccatgtccgtgtggagcacgtgcagccatccaggtgcaacgaggagttcctccagaggaaactcaacaacgacaagctgaaggcggaggccaaggcgcgcggcgaggtcatcagcaccaagaggcagccagcagggcccaagccggggttcatggttgagggcaccaccatcgagacggt

SEQ ID NO: 7431 - DNA, 486 bp, Triticum aestivum
  Clone ID: uC-tsrow189018e11b1
ctccctttcctttccttcccccctcgcttcgtttgtgcgttgcctttttctttccgccgcggcaactgtgagccggcccgatcgagcgagccgccccccacgcacctcaagaaaccggcataattccatccatccatccgctgccgcgtcctacgcggccatttggggcgctcgtggggtgttcgtcacatcaaccaggccaagatcagatcggcggcgacgacggcgaccatgttcagcgggacgcagcagaagtgcaaggtgtgcaccaagacggtgtaccccatggaccagctctccaccgacggcgccgtcttacaccgcgcctgcttcaagtgccaccactgcaagtgcaccctctcctttagcagctactcctcgttcgaaggggtgccctactgcaagccccatttcgcgcagctgttcaaggagaccgggagctacaacaggagcttccaatcacaatcacccgcaaaatctgcaacg

SEQ ID NO: 7432 - DNA, 268 bp, Triticum aestivum
  Clone ID: uC-tsrow189018e12b1
cccacgcgtccggcccctcgatgttcagaggcctcggagcgaatggagcttagtcgagtgggcaaagccatacatacgggacttcaggatcgaggagatcgtggaccctggcataaaggggcagtactgctcggaggccatgtggagggtgctggaggtggccacggcgtgcaccgagtccttctcgaccttccgcccgagcatggaggacatcgcgcgggagctggaggacgcgctcatcatcgagaacaacgcttccgagtacatg

SEQ ID NO: 7433 - DNA, 263 bp, Triticum aestivum
  Clone ID: uC-tsrow189018f01b1
ttccactcgtccgaattgtgcaacgaaagagcacttgttctgccgtggctgcatcgaaacctggctgaaacaaggacatcaccagtgccccttggatcgaaaagaactcaaagttgacgatttggtgctgaacgaattcgttcggcattccatctttgcgcaacgcaccacatgcacacacgttccgctctgcgactgggttggtgtcattggaagactggatgaacacctcggctccacatgtcccctgcagaaaattgtct

SEQ ID NO: 7434 - DNA, 374 bp, Triticum aestivum
  Clone ID: uC-tsrow189018f02b1
ttaatgatgacaaacagtatgtgtgggagtccaaagctgatggatcattcgctatttccgaggatacatggaatgaacccctgggccgtggaactgagatcaaactgcatctccgcgatgaggctaaggagtacttggaagaaggcaagctgaaggacttggtgaagaagtactctgagttcatcaacttccccatttacttgtgggcaaccaaggaggtcgatgttgaagtgccagctgatgaggaatcaagtgaagaagaggaatcaaccacagagacgacagaggaagaagagacagaagatgatgaagagaagaagccaaagacaaagactgtgaaggagacgactactgaatgggagcttctgaatgat

SEQ ID NO: 7435 - DNA, 178 bp, Triticum aestivum
  Clone ID: uC-tsrow189018f04b1
tgggacggagaaggagcacgaaccctcagccccatggcctccatctcggtcccggaccctgccccttccccaaccgaggatgcagagaacataaggaaagcagtacatgggtgggggacggacgagaacgcgctgatcgagatcctgggccaccggacggcggcgcagcgcgcggaga

SEQ ID NO: 7436 - DNA, 413 bp, Triticum aestivum
  Clone ID: uC-tsrow189018f05b1
gcaacccgctcccgcgtcggcgccgccgcctccgcagcgccttccccggcagaagccccagcgccccaccctccatggcgaagaagaggaagcgcagctccgatgctcccgcgcccgcctccgtagagaagcccgacgactctgcgccggagcggccggagcgcaccctcttgggcttcaaggaccagccggactccgccgccgagcctgcttacaaggacgcggggccctacttccggaacagggaaaaggtgctcattacgtgctcccgccgcatcatctacagggtaccggcacctgatgcagaacgtggtgtcgctgctgccgcacgccaagaaggacagcaaggccgagtccaagcagagcatgtgcagcgcgctcacgagctggtcgagctcaggagctgctccagc

SEQ ID NO: 7437 - DNA, 204 bp, Triticum aestivum
  Clone ID: uC-tsrow189018f06b1
actcttgtttataagtaagcttgtccgttgtgcggagaggggaggcggataggtacatacacatggaagggttgcagagatcgtcctccactttcagaaggtccggctcgtcgggcctggtgtgggacgagcggttcctgaccgagggcgccgaggcgaaggccgtcggctagggcggcacggatgaagcccagccggagatgc

SEQ ID NO: 7438 - DNA, 366 bp, Triticum aestivum
  Clone ID: uC-tsrow189018f07b1
tccacgcgtccgcccacgcgtccggcttgttattgatcgtgccatctctactgtgagtgtgatcgagctagtgatcaaacgcgagaagatggcgttgcactggagcagcggcctcgcggtcgccgtcgcggcggcgctggccgtgtccgcgctcttcccggcgggcgctgcgggtcacccgccgttcccaggcccgttggtcccgcagttctacgagcacacgtgcccgcagatgcaggcgttggtgggcgccatcgtggccaaggagcacgccaaggatccccgcatggtggcgtccctgctccggctgcacttccacgactgcttcgtgcagggctgcgacgcgtcggtgctgctcgacgccga

SEQ ID NO: 7439 - DNA, 377 bp, Triticum aestivum
  Clone ID: uC-tsrow189018f08b1
tccacgcgtccgaagataagctatatacagagtggagaggtcacacaccagagctagatacagagaagcaacaccatgcgcgctccggcgagcctcctgcaccgcgtcgctctcgccaagactggtccgggcgagccatcgtcgtcgccgatgagtatgaaggctcctgagaaccagcagacggctcctgtgatggcagtgaactcagacatggtgctcatcctagcgtcgttgctatgtgcgctcgtctgcgtccttggcctcgccctagtctcccggtgcacaggccgacgccgccgctcgccctcattcttcgaccacgctcctccagccccaaagggcctcaagaagaaggccatacacgcgctccaaccgtc

SEQ ID NO: 7440 - DNA, 359 bp, Triticum aestivum
  Clone ID: uC-tsrow189018f09b1
gacggaggctcgcaaggctgaaactgcagtctcggcaaggccgcctctctgtagctagcgtagcagacttctgttcagactgttcttgcgtgcagtgcacttcttggctagctagctactcggccatggcggatcaccagaggcagaggatccacccggtggacctggaggcgggccagccgaggccgtcggcgccgctggtgccgccgggcagctcgttccggtccgacaagggcgacccggccgctgccccgacaggaggccgccacaccaccagccgctgccgccgccgccgcgccgcgtggccgcacctgtgccgctgccgccaccgaagcggcgcaggggctgctgctgccgct

SEQ ID NO: 7441 - DNA, 310 bp, Triticum aestivum
  Clone ID: uC-tsrow189018f10b1
tatggaatgttttgccatggctagacgctggttggataatgagcctctatgacctgccctatttaattctatcattttgttcatgatagaatcatgagggattttaatgtacaatacaagatcagacctgcaccaagtattaattaaattatgtaaaaaaaaggaggatggacctcggcctatacatctggttgatgcatacagccagtttattatgaagccatcgctgagctggattccctcggagaagatttctacaaggacagcaccctgataatgcaacttctccgtgacaatctcaccttgtgga

SEQ ID NO: 7442 - DNA, 200 bp, Triticum aestivum
  Clone ID: uC-tsrow189018f11b1
ttgcctagctagtgccaaccaagctacgcagctcaagctcgacccgatcgatggccgggaggaagcaggcgacgatggcgagcgcggcggccgtggcgctgctgctggccatggcggccgtgtcgggcgccggcgcggcgcccggcccgctgatgatgtgcaatgtggacgtgtaccgcatgatcggcgcgtgcaggtcg

SEQ ID NO: 7443 - DNA, 262 bp, Triticum aestivum
  Clone ID: uC-tsrow189018f12b1
ttggacgcgtgggttggatagtgaatgaaatgaagaaatcaggtctacgagggcgtggaggtgcaggttttccgtctggcctcaaatggtctttcatgcccaaagtgtctgatggacgtccttcttatcttgttgttaatgctgatgagagtgaaccaggaacttgtaaagacagggaaatcatgcgccatgacccccacaagcttctggaaggttgcctgattgctggagttggaatgagggcatcagctgcttacatcta

SEQ ID NO: 7444 - DNA, 95 bp, Triticum aestivum
  Clone ID: uC-tsrow189018g01b1
gtaagttaataagagaacctacaggattgtatgctgtatgcactattgttctgtgtccacgtgtactgttttattcatggacggtcggttgatcc

SEQ ID NO: 7445 - DNA, 406 bp, Triticum aestivum
  Clone ID: uC-tsrow189018g02b1
tcacgcgtccgtcctcctaaaccactctccctatccccgtgtccagaagctaccccccggctccaatggcggcgaaggaaccgatgcgcgtgctcgtcaccggcgccgcaggacaaatcggatatgctcttgttcccatgattgccaggggagttatgcttggtgcagaccagcctgttattctgcatatgctggatattgaatttgctgctgaagctcttaaaggtgtcaagatggagttgattgatgccgcatttccacttctcaagggagttgttgcaacaactgatgttgttgaggcctgcactggtgtgaatgttgcggttatggttggtggattccccaggaaggaaggaatggaaaggaaggatgttatgacgaaaaatgtttcaatctacaaagctca

SEQ ID NO: 7446 - DNA, 289 bp, Triticum aestivum
  Clone ID: uC-tsrow189018g03b1
gattttgccagggaccacgctatctggattggccaagcttaagacagtttttaagaaggatgggactacaactgcaggtaattctagccaagtgagtgatggcgctggagctgttcttctcatgaagagatctgtagcggtgagcaaggggctccctatacttggcgttttcaggagtttcgctgctgttggagtggatccagctgttatgggcgtcggtcctgcggtcgccatacctgctgcagtcaagtctgctggccttgacattgacgacattgatctctttgaa

SEQ ID NO: 7447 - DNA, 261 bp, Triticum aestivum
  Clone ID: uC-tsrow189018g04b1
ttgtacgtggacgaggcgctcctcgccgccgccgcctacatgcagatccccacgggcttgccgaggctgcaagtggggcccgagggcaataaacaaattgttcgttcgggttcaagcagacgggttggattaatcagaccaaattcacccaagtccccttttgctagtgcaagtactttagagagtgtagaggggtctgatgaggatgccgcgatgaaagtcaacggcaaactagataatggccatgcgagcacaaacaga

SEQ ID NO: 7448 - DNA, 208 bp, Triticum aestivum
  Clone ID: uC-tsrow189018g05b1
ggactttgataacaggatggtcaaccactttgtccaggaattcaagaggaagaacaagaaggacatcagcggcaaccccagggctctccgtaggctgaggacagcttgtgagcgggcgaagaggaccctctcctccactgcacaaaccaccattgagattgactcgctgtatgagggcatcgacttctacacgaccatcacccgtgcc

SEQ ID NO: 7449 - DNA, 276 bp, Triticum aestivum
  Clone ID: uC-tsrow189018g06b1
ttcacgcgtccggatgaagatagcggaatcgagatagggcgtacagttaagaagttccctcttttaacaccaagagagtacatattggcatggcgagtttgggcatcagatgagaactctttctattgcttggtcaaggaatgtgaacactctcttgcgccaatacaaagaaaatttgttcgagtacgacttctgagatcggggtggtgtattaggaaagtccctggaagagacgcatgtgaaatcacagtgctgcaccatgaagacaatggcatg

SEQ ID NO: 7450 - DNA, 192 bp, Triticum aestivum
  Clone ID: uC-tsrow189018g07b1
tccacgcgtccgggccacccgccagcggtcggctagggattggtcggctccttcctcctccgctcagattcatccacttctgcctcagctgcggctgtccgctacaacatcaggctccgtcgacgccgcgcagtgcctcggtgagccgtgtgagcagactgccccctctgtatctctcccaatctctcccct

SEQ ID NO: 7451 - DNA, 309 bp, Triticum aestivum
  Clone ID: uC-tsrow189018g10b1
tcacgcgtccgggtgaattcactgattctcagattgttgtgatgcttggtgagaacggcacagggaaaactacattcatcagaatgctggccgggttgttgaagccagataccatggaaggaagtgaggttgaaattcctgaattcaatgtgtcctacaagcctcaaaagatcagcccaaaattccagcatccagtgaggcacttgctgcattcgaaaatacgcgattcatatactcatcctcagtttgtatctgatgttatgaaaccactacaaattgagcaactcatggaccaggaagtcattaatt

SEQ ID NO: 7452 - DNA, 304 bp, Triticum aestivum
  unsure (1)..(304): unsure at all n locations
  Clone ID: uC-tsrow189018g11b1
gcggcgcaagccatggccacggtggagcagcagcagcagatcgagcacagccacctcgccatcagaggcctcagcctccacgtagcgcaagcaggcacaggcgagctcgggacggtgctgttcctgcacggcttcccggagatatggtactcgtggcgccaccagatgctggccgtggccgccgccgggtaccgcgccatcgcgccggactggcgggggtatggcctctccgaccagccaccggagccggaggctggggcctacagcgacctgacagaggatctnctcgccgtcctggatgcgc

SEQ ID NO: 7453 - DNA, 409 bp, Triticum aestivum
  Clone ID: uC-tsrow189018g12b1
tgggctgcccgtgctgcggggagctcggatgatcgcgcgctgctgagcgtggcgtccctgttccccggcccggcttgccccgcgacagcagagcacggacccagcgctgcggcgtcagcgaggatgaggatcgtccaccagcacggcccatgctctcctctggccgatgcgcacggcaagcggccggcccacgacgagatcctcgccgccgaccagaaccgcgtcgtcgtcggggacggggtacctggacttcggcccggggtcggcgggcaacaacgcgaggctgacgccgatgctggccgacaaggggccgacgttctactacgtgggcatgaccggcatccgcgtgggcgggcagcaggtgcccatcgcggagtcggtgttctccacggacgggacgctggtggac

SEQ ID NO: 7454 - DNA, 102 bp, Triticum aestivum
  Clone ID: uC-tsrow189018h01b1
ttgaagaacccgctggacgccatgggcgccttcttctcggcgcaggtgaaccgccgcaagctggtctccacgcagaagctggccatgtccgagcgctgcacc

SEQ ID NO: 7455 - DNA, 177 bp, Triticum aestivum
  Clone ID: uC-tsrow189018h02b1
tgtgcttagggtgaagcagaggccaagtacctgtctggcctcggtatcgcccgccagcgccaggccattgtggatggcctgagggacagcgtcctgggcttctcagtcaatgtgcctggcactcactgcaaaggacgtgatggacatggtgctgatcacccagtactttgataccta

SEQ ID NO: 7456 - DNA, 225 bp, Triticum aestivum
  Clone ID: uC-tsrow189018h03b1
acctgtttggtggcgatgtgctgcgccgagcacgacgcgcacgccggcgagacgcagtgcctcacccacaccgtcggacggatgctcgccacgctcgagctcaggtccaccccaatcaacaccaagggctacgagacgctgctccggctcgtcgacaacacctgcagcgacagcttcgacctctacaacggcctcttcatgtacaacaagaactccaccgacctg

SEQ ID NO: 7457 - DNA, 373 bp, Triticum aestivum
  Clone ID: uC-tsrow189018h04b1
tttcggtgtccatccaaggacagctttctatcaggcatttctcaagttggcgaagtccatatggttattgcacaggctggcgtactctttcgatccaaaggtcagggtcttccaagtgaaaaagggaagcgagttctcggagattcacatggaaagcgtagtcaagaacatggtcttggatgaaagtgccgagaggcctaaagtaggtttaatggtgatgcctggtttcttgattgggactagcgtcatacaggcccgagtgtacctatcagatgtcaaatatgctgactgaaaatgctgcagctgcttgggaagattcagggcgtattagttcctgcgggctcatttagttgcatctgaaatggcgggggac

SEQ ID NO: 7458 - DNA, 275 bp, Triticum aestivum
  Clone ID: uC-tsrow189018h05b1
tcaagagctaccaaacgccctactttaattttaattatcgccgctgctcccacgcgcgttccacgtacgtagcgacgaccttccgctcgcttttcttccgcctagtctgcccgccagatctgcatccgcggatatgaagatcacggtgcggggatcgacggtcgtggtgccggcggaggagacgccgcggctccggctgtggaacgccaacccggacctggtcgtgccgcggttccacacgccgagcgtctacttcttccggcgcggcgcggggg

SEQ ID NO: 7459 - DNA, 256 bp, Triticum aestivum
  Clone ID: uC-tsrow189018h08b1
tccacgcgtccgcgcctaccttggcaaggataccagggagacaacaaaggttttcttgtcagcaagaaaaagatggcgacctctcctgaatctctgtgtggcatttgtccacagtcttttcgacactttgttgagtatgttgtgaacttgaagtttgacgaagaacctaattacgccaagtgcatctctctttttgacggcattgttggtccacatccagacaccagaccaataaacacagatggtgctcagaagc

SEQ ID NO: 7460 - DNA, 440 bp, Triticum aestivum
  Clone ID: uC-tsrow189018h10b1
tggaagcctggatgattggctccataacagggatgatggtgctatctcattgcttgactggcctactcggctcaagatcgcacaaggagcaagcctgggcctttcttatatccatgatgcctgcaaccctcaaattgtccatcgtgacatcaaatctggtaatatcctactggacaaagaatttaaagcttatgttgcagactttgggctagccagattgatccttcccaacaacactcatgtcacaacggagctggtaggtacgatgggttacatcccacccgagtatgggcaatcatgggttgctacgctgagaggtgatatatacagtttcggagtagtcctgcttgagctgctcacaggaaggcgacctgtttcagtgttttgtacaccaaaagaacttgtcccatgggttttacagatgaggtctgagggaaagc

SEQ ID NO: 7461 - DNA, 299 bp, Triticum aestivum
  Clone ID: uC-tsrow189018h11b1
tttgtgtttttgaaacccaatgcccatgatagtggaaaatcatccgcagataatataagcgacctgcaagctgttttgcatagccttcctcaagccgagcttcggttgctatgttcattgcttgcgcatgatgggttatcagacaatgcatatctccttgtaccagaagttctgaaaaagattgtagcttcggtcctttcatgtgaagccatttataaatgagctttcacgttcgatgcacaattcgactgtttgcgccatgaacgagcttcacttgtatgaagattctgaaaaggcaa

SEQ ID NO: 7462 - DNA, 423 bp, Triticum aestivum
  Clone ID: uC-tsrow189018h12b1
tggacgcgtgggcgatttgcatggacaagggccacctcggtggcggcggaggaggaggaggactgctcgccctggacgcctcgccgcggcagctcggcttcctgaacttgctatcaccggcgccgttccacaggagcatggaggcggacgacggcggcggtggcggcggcggcagggggaggaggtccatcgaggttgacttcttctccgacgagaagaagaacatgaagaagagccgcgcatcggccggtgctgacgcggaggaccacaaggatcaggcctacgacgccggactcgccatcaagaaggaggacctcaccattaacctccttaccgggaacaacacgaggagcgaccggtccatggtggtcgacgacgacggggcgtcccgggccgacgaggacaggaacggcaggaacaccg

SEQ ID NO: 7463 - DNA, 434 bp, Triticum aestivum
  unsure (1)..(434): unsure at all n locations
  Clone ID: uC-tsrow189020a01b1
tcttttctgctgcatctcagatctcgcgggcaccaacaaaccaaagctctctctcccgatcactctcccttccaggaagcttggaccgaaggaaggagctgagaggaggccatgggggaattctccaaggaatcttgcccttccgtgaagaacattttgctactggattctgaggggaagcgtgttgctgtgaagtacttctccgatgattggccgaataacgcatctaggttgacctttgaaaagtccatttttactaaaactctgaagacaaatgcacgctccgaagctgagataacattgcttgatggttatattgttgtttacaangtttgtacaagacctacactttttcgtcactgccggagatgatgagaatgagctcatcatacaaatgtgcacagggttttgctgattcggttggtcttctacta

SEQ ID NO: 7464 - DNA, 431 bp, Triticum aestivum
  Clone ID: uC-tsrow189020a02b1
ccaagaaagtaaattgcataatccacttaggtccatcttctgtgacaaatactgttgattatcagaactggatgaaatcttttggcaccacacagcatatcatggcagggcatgaaaataaaaacatggaagttcctatcctgaaaggtagtgcaaggatatcttcacgtcttaattttgtatgccctcagctcttcccatcctctgggttttggcctgtggaacctgcaaatggtattgatttggagaagaataagagtacttcattccaagcctgtgaaagtgtgacagcagcaaacttgctgaagtttcgtctgcgtccatatgctcaactggggttggatagagcttctattccaagcttgtttagttatgaagaaattgtagatgaacttatttctgagattcctgagattaaagaagttcctgag

SEQ ID NO: 7465 - DNA, 434 bp, Triticum aestivum
  Clone ID: uC-tsrow189020a03b1
tttttgttcctctctgctctgctttctgactcaaaactgcaacaatggctgccccgacctctgcgatcggatttgagggctacgagaagcgccttgatatcaccttctctgaggcatcaatctttgctgaccctcatggtcgtggcctgcgcgccctctccagggcccagattgactctgttcttgatcttgcacggtgcaccattgtgtccgagctctccaacaaggactttgactcgtacgtgctatccgagtcgagcttgtttatctactctcagaagattgtgatcaagacctgtgggactaccatgctcctgctcaccattccaaggattctcgagctggctgaagagctgtgcatgtcgcttgctgctgtgaagtactcccgtgggatgttcatcttccccggtgcacagcctgctccccacaggagc

SEQ ID NO: 7466 - DNA, 389 bp, Triticum aestivum
  Clone ID: uC-tsrow189020a04b1
ttctttcgtccgataaaagcaaactggagagaccatctgttcctctccctaccaaccatcttccttagcgacgaggccacccagagctccacaggaaagaagcgcgaccggagaaagaaggagagcaagatgtcgtcggtgttcagcggcgatgagacggcgcccttcttcggcttcctcggcgccgccgccgccctcgtcttctcatgcatgggggcggcctacgggacggccaagagcggcgtcggggtggcgtccatgggagtcatgcggccggagcttgtcatgaagtccatcgtgcccgtcgtcatggcgggagtgctcggaatctacggcctcatcatcgccgtcatcatcagcaccgggatcaaccccaaggccaagcccta

SEQ ID NO: 7467 - DNA, 444 bp, Triticum aestivum
  Clone ID: uC-tsrow189020a05b1
tttgtcgcgtgggcggacgcgtgggcgcacccgcacccgcacccgcacaacagagacccagagcaggcgacacaccgcccaggcccagctgcagctccggcgagatctccggcgacccttcgagatgagccgcggatcgggcgcgggctacgaccgccacatcaccatgttctcccccgagggccgcctctaccaagtcgagtacgcgttcaaggcggtcaagtcggcgggggtcacctcgatcggcgtccgcggcaaggactccgtctgcgtcgtcacccagaagaaagtcccggacaagttgctggatgacaccagcatcacgcacctcttgtcgattaccaagtacaccggcttgcttgccaccggcctcacagctgatgcgaggtccttggtctcccaagcaagaaatgaagcagctgagttccgtaaaaaatggggata

SEQ ID NO: 7468 - DNA, 350 bp, Triticum aestivum
  Clone ID: uC-tsrow189020a06b1
tcctcgcgtccgccacgcgtccgccgtgatcgagcacacagctccaatccccaagtctaaccccatggctggctaccccccaccccccggctctggctacccctacggcgccgctggcggctacggagccccaccgccctccggccagaagccccccaaagaaggcaagacctcttcctcctccggccccgacccctaccacggcgctccgcccccgcagcagccttacggcggcggcggcggctacggagccccaccgtcctacggccagaagcctcccaaggaaggcaagacctcctactcctccggctccgacccctaccacggcgctccgcccccgcagcagcctt

SEQ ID NO: 7469 - DNA, 393 bp, Triticum aestivum
  Clone ID: uC-tsrow189020a07b1
tcttaaagttgcacattgcaaactgcagatctcttacatctgttggacaaggacaaccaccaattagggcattcaaatcccttacattcctaatcattgacaattgtgagaacctggcaacccttgatggtcttctaacagaactatgtttgcctgccattcgaaagattgatgttaggaattgtggcaagttacagttcctttttggtgaaaggcctgggagttttccttcccttgaagatctgttgcttcatgattgccctagcctcaaatggccaagggaattagtgttaccatcatccctaaaaaagctccacttagttcgatgtggggatatttcctcctggttttcaagctgtctacagaacctcaaatctttggctgaactggctt

SEQ ID NO: 7470 - DNA, 412 bp, Triticum aestivum
  Clone ID: uC-tsrow189020a09b1
ttctttctggacgagctcgctctcgggctcgaggcctcagggatggcgttcctgtgggtggtgaggacggacaagtggtctcccccggagcggtggcacgagcgtgttggaggcaggggaatggtggccaccgcctgggctccgcaaagggctatcctggggcaccgggcggtgggggccttcgtgacgcactgcggatggaactccgtcctggagacggtggcggcgggcgtgccggtgctcacatggcccatagtgttcgagcagttcatcaccgagaggctgctcacgcaggtcctagggatcggggagcggctgtggccggacggcgccggcgttcggagcacgaggtatgaagaaaacgaggtaatccccgcccaagatgtggcacgggcattgacgaccttcatgc

SEQ ID NO: 7471 - DNA, 425 bp, Triticum aestivum
  Clone ID: uC-tsrow189020a10b1
ttctcacgcgtccgcggacgcgtggggcgcgtcctcaacaccggctccccgatcactgttcctgttggtagggcgactcttgggcgtattatcaatgttattggtgagccaattgatcacaagggagatataaaaacaaacagttacctgcctatccatcgtgaagcccctgctttcgttgagcaagctaccgagcaacaaatccttgttactggaattaaggttgtggatctacttgcaccctatcaaagaggtggtaaaattggtctcttcggtggtgcaggggtgggcaaagacagagaaaccaccatgggccttggcaacgttgttggagaacgtacgcgtgagggtaatgacttgtacagggaaatgattgagagtggtgtcattaagcttgacgacaagcagagtgagagcaagtgtgc

SEQ ID NO: 7472 - DNA, 384 bp, Triticum aestivum
  Clone ID: uC-tsrow189020b01b1
tttctggcaaccagccgcggcggcagtcgggtctccgctttcacgatgcgcgcggtggcgcgcatgtcgagggcgcggtggttcatcttcctgaggcgggtataccagtaccagaacggcccgaggtctgacctgggctccaaccctttcaactcatccggctggctcgctcttgagctcggcgtgatcgtcgcgcagatggtcatcaccaccaccgttgtggccacctccccaaaggaacgccccgcgtggccgcttcggctctgggtctgcgcgtacaacgtcggcaacgtgctcagcctcccactcctctactggcgccaccgacattcatcggccgccggacgaggcgacgaccccgagatgcacggtgccggtgacgct

SEQ ID NO: 7473 - DNA, 439 bp, Triticum aestivum
  Clone ID: uC-tsrow189020b02b1
ttactcatgcactcccagaaccactggggcggggcgttcgacatcgacggcgcggaggacgaccagagccgcaacatggacatcgaccgcggcgcgctgcagcaccagcaccagctggacgagacgcagcagagctggctgctcggcccgccggaggccaagaagaaggaccgctacgtcgacctcggctgcgtcgtcgtcaagcgcaagctcctctggtggatgctctgggtcgtgctcggcgccttcgtcctcatcggcctccccatcatcatcgccaagaacatccccaagaagaagccccacgccccgccgtccgacaagtacaccgacgccctccacaaggcgctcctcttcttcaacgcccagaaatccggcaagcttcctaagaacaacggcatcccgtggcgcgggaactcgggcatgaaggacggcgcgg

SEQ ID NO: 7474 - DNA, 379 bp, Triticum aestivum
  Clone ID: uC-tsrow189020b03b1
ttggtcgcgtgggtgatgccctgagtaaggggaaatcacatgcccaaagtatggggaaatctgtcgtgtcttcttcggtgccacctgttccttcatttgctcctggtggatctactcttggttctccgaacggttatacgccctttgggaatatcaaaaagatcaatggtgattcaagctcagccttccctgcccccagaggccctccacccagttcaatgccgaccttcgaaactattccgagacttcccccttactgttcacttccaacccatggtttgcagaaggcattccctcctccacctgcctatgactacaatcagtttagcttcagtaggccttccgcagttaatccatatggaatttatcaagatcccta

SEQ ID NO: 7475 - DNA, 321 bp, Triticum aestivum
  Clone ID: uC-tsrow189020b04b1
tttctccgtcacggcccaggcaaagtgaaacaacgaaaagcaaacagcacatccgaagcatccatcccctgagtttgacagcttcctaatcgcagttcgtcctcgcccaaatcgagcagccatgtcgctgattccccgcggcaacgccttcgaccccttctccctcgacctctgggaccccttcgacggcttccccttcggctccggcggcagcagcagcggtggcagcctcttcccctcgttcccgcgcatcagctccgagaccgcggccttcgccggcgcgcggatcgactggaaggagacgcccgaggcgcacgtgtt

SEQ ID NO: 7476 - DNA, 433 bp, Triticum aestivum
  Clone ID: uC-tsrow189020b05b1
ttcttacaccactgtagatcagagctacaaagcaattacataccggtgttgtctttgtggtgcctcttcaaattctttccacttgttgcccactgacgaagttgtaccgagcagaggaaaagctgacctggacgattctagcttgaacatggataatgaggtttgcttcacaattttgcaaacattgattcttttactaagtttatcaacaagtcgatatagaatcagtaactgcagttctggaactatttacaggaatgtgcggctgcttttgtatttttcaaaactcggtatggagcacttgttgcgtcagacgttcttcagacatcgaaccctaccaagtgggttactgatccagctccagaaccaaatgatgtgtattggtcaaacatttggcttccctacaagcagctttggattcgaaggatagcga

SEQ ID NO: 7477 - DNA, 337 bp, Triticum aestivum
  Clone ID: uC-tsrow189020b06b1
ttctctttgctcacttgacaaggattcatgaaacgacgtcaggtttaggtcaggttgagaaaggagcacggcagcaacatgtaaaagcctttcgaagttgtgaatgagagaagagcaagcacctatgtcggcgaggagatcctcgtcgcggccgtggcagggcgtctgtgcagctgcacctgtcttgggaacagcacgtcgtcgtggccgtcgtcgagtgactcggcgacctcgtcgtcgcggccgtagtcggatgcctcggcggctgcgcagggcggcgacgtcgcggccgtcgtcggtgcggccgtcgtcagatgcctcggcggctgcgcatggc

SEQ ID NO: 7478 - DNA, 406 bp, Triticum aestivum
  Clone ID: uC-tsrow189020b07b1
tcggcagcccagcagcgcacaaccagcatgaacgccggcggccggcgcgacatacggccaaggcgcagccgacacgcccctttcctgacccctatcccgcctagcccgtgttcctctccgtgcccggctgcacccctatgttcttccgcgatcgaggcccgtaggcacccctctgtccgccgcatctcaggcgacgtcagcgacgaccaaggacagcaggagcgccacaagaacacttcatcagcaatacattgatcagtagttcctgaggtgcaccatggaaattatcatcctcatctcacttgttgtgcttcttgtactgggagcactctttgctatcccggatccaaaacaaaggtgaaggaaaggatgcacgtgcagcctgaaatggaacgacatctacgag

SEQ ID NO: 7479 - DNA, 376 bp, Triticum aestivum
  Clone ID: uC-tsrow189020b08b1
tttggacgcgtgggttgcgaaattcacctggaattatgcggatacgccaaagaagtgaaactacaaaagattgtggagacggtgaaacaagcatgccatgctatgtgctcgtgtgatgaatggtgccccctgtatcttcatcttgtgaattgtcccgtgaataagaacatgtgcactgtctccacctgccgtgtaaatttatgtgtgcctgtataacagaagactgagactgtgctagctatgtttgtggctctctagtcttaccggctttccgtgacagcaattacactgttggaaaatgtatctgctcaaagagatattcagaagcatatcaagacgtttgaaaaaaaaaacccacgcgtccagggacgcgtgg

SEQ ID NO: 7480 - DNA, 250 bp, Triticum aestivum
  Clone ID: uC-tsrow189020b09b1
ttttcgccggagcaccccacccaaccgcctcggtcgtcggcgaggaacctgctccggtaggcggagatgggcgggcacggcgggctgaacatcctgccgcagaagcggcggaacgtctacaggttcgacaaccaggagaaggtccgcgtcgacgaggccgaggccgcccgccaggaccagctccagcgcgaggccacccgccgccgagagtcgcacgcccgcctcgtcgcgctccgccgcaaccggggcc

SEQ ID NO: 7481 - DNA, 107 bp, Triticum aestivum
  Clone ID: uC-tsrow189020b10b1
ttttgttaaatcaaaccgaacccggcctcactagctgtcactagccccccccgcccgcctgggccctccttaaaaattcggaggagctcgccgaccggcggatcggc

SEQ ID NO: 7482 - DNA, 411 bp, Triticum aestivum
  Clone ID: uC-tsrow189020b11b1
tgttcttccacgcgtccgcaccactttgctccatctctcagactccaatctctctctcctattggacggacggtcagagtcagacccctttgccttagcccgtaaggttacgtggacattgtggttttccttggcctgcccttcttggcgcattgtttcgtccgtctcgatagtcgacagtctgaagctctcttgggactgacttgggaggtgaggtgagacggcgcggcagcaatggctcaccggctgctgcacggcaccctccacgccaccatcctggaggccgacaacctcaccaaccccgaccgcgccaccggcggcgccccccagatcttccgcaggttcgtggaggggttcgaggagacgatcgggcgcggaaggggtcgacgcagctgtacgcgaccgtcgacc

SEQ ID NO: 7483 - DNA, 404 bp, Triticum aestivum
  Clone ID: uC-tsrow189020b12b1
tctttcgttctctcggtctcgcgaatgagaggcggcggcggcaagatccaagagcgacgctccgccctcctccgtccaaggctccgcccggcaaccggaggcgacgcaccaccgcctacacctccacgaactgctcctccggcgggggcaacggcaaccggggtcatcatcctccctctccccggatctcgtctctgcccagagatcgaaggaccttctctgttgtctgaaatttgtacccaagtgagcagctgtactgaagaacatcgaacgttttgcagtgcatctaactaacctgacctcacaagtgctgatttgtaggtctgctctgaaattagaagttggctttatctgaagaccttgtgtaaaattgcttggtgcctttcgaaagatttcactcagag

SEQ ID NO: 7484 - DNA, 307 bp, Triticum aestivum
  Clone ID: uC-tsrow189020c01b1
tttttaccctagcctgcctcccaggagcgccgagtccctccgcccccaacagatctacgcgcgcgaggttcggttcggtcttcggagctcgagacatggcggaggagaatgccccagttgaggttgccgctccggttgcggcccctaccccagttcttggagagcccatggacttgatgactgctctgcagcttgtgatgaagaagtcaagcgctcatgatggccttgtcaagggactccgtgaagctgcgaaagcgattgagaagcatgctgctcagatctgtgtgcttgctgaggactgcgacca

SEQ ID NO: 7485 - DNA, 443 bp, Triticum aestivum
  Clone ID: uC-tsrow189020c02b1
tgtttagcgcgacacggagacatccgtctttgccaagcttgccgcgttcgagcaggagctccgtgcagtgctaccaaaggaggtcgaggctgcccggacctccgtggagaacggcaccgccgcgcagcagaaccgtatcattgaatgccggtcatacccgctctacaggttcgtgcgcaaggagcttgggactgagtacttgactggggagaagacacggtctcccggggaagaggtcgacaaggtgtttgtcgccatgaaccagggcaagcacatcgacgcgctgctggagtgcctaaaagagtggaatggtgagcccttgcctatctgctgaacagaggatcaagaaactgaagagaagacagtgtgcagaaggctctgtatcttcttagctgataagtgataatagtttttcaattgtattttcttaagatcgatgtttt

SEQ ID NO: 7486 - DNA, 393 bp, Triticum aestivum
  Clone ID: uC-tsrow189020c03b1
ttcttcttgttatgctccccccggtcaacgcctttgcctgctgagcctgggaatgattgatccgctcatgatctacaagacgagaagcaagcccagttttgctcctagctagctgctttctcctcctcctccaatctccagcaacgaatgaaggagaagctggcaaccatattcatatccataatccatatctatatgcgagctattgcttgctagaaagcttcttgctcgcatactcggaaatgggcggatacgagttccagagggcggagctagatgcactggaagggcgtcgtacgcgatccaactgcggagccaatgagtctgacgttgccgcttctcaggcacataacaaatgatttctcccctgaatttgaaattagtaaagatgat

SEQ ID NO: 7487 - DNA, 440 bp, Triticum aestivum
  Clone ID: uC-tsrow189020c04b1
ttcttatccccccccgccccccacgaacccacagcgcgctcccgagatccgcagccgaagcccgtgagaaaagcgaagcgcgagaggaaaggcactgaactagtttgcaacaaagaagagggaaaatgtctaccgctgaggcaacccgtgaggagaatgtgtacatggccaagcttgccgagcaggctgagcgttacgaagaaatggttgagttcatggagaaggtggcaaagaccgctgatgttggtgagctcactgttgaggagcgcaacctgctctctgttgcttacaagaatgtgattggtgcccggagggcttcctggaggatcatctcctccattgagcagaaggaggagagccgtgggaacgaggcctatgttgcttcaataaagagtaccgtaccaggattgaaactgagctcagcaagatctgtgatggca

SEQ ID NO: 7488 - DNA, 346 bp, Triticum aestivum
  Clone ID: uC-tsrow189020c05b1
ttgttaacgcgcgtgagctcacactcaccgaacacacaaatggggcgcgccaccacctgcctggccaccttgttgctcgccgtcacctttctgtttgcctccgccgccacgaagtcgcttacggccatgcagacggaccaggcggggactaagagcgggtccaccctgccggcgcactgctgcaaacaggaggagaaagcggtggccaagcctcagcttgttgttggcgatctagtggacttggcatcagcggaggagcaaggccagaagcctagccctcaccggagtaacaaaaagaagatccaccaccaccaccatgacgacgacgacgacgatgatgatggtg

SEQ ID NO: 7489 - DNA, 399 bp, Triticum aestivum
  Clone ID: uC-tsrow189020c06b1
ttggtgaacatcaccgtcctcctcgaccgcggctcctccgggccgcagcccaccggcgccaacatccgccacgcgttggccaagctcgtcggggacgcgcgccgtggggacttcctcttcttccactacagcggccacggcacgcggctgccggccgagaccgggcaggacgacgacaccgggtacgacgagtgcatcgtgcccagcgacatgaatctcataacagatcaagatttcagagatctggtgcagaaggtcccggatggttgcatatttaccatcgtctccgactcatgccacagtggtggcctactggacaaggcaaaggaacagataggcaatagcaccaggcagaatcagacccagtctcgtgaacccgaagaagagcgatctcattct

SEQ ID NO: 7490 - DNA, 412 bp, Triticum aestivum
  Clone ID: uC-tsrow189020c08b1
tcttgaagacttgtacaatggtgctaccaagaagctatctttatcacggaatgttctttgtggaaaatgcaagggaaagggatccaagagcggggcaacggctacttgcagtggttgtcgtggtgcaggaatgaggatgataacaagacagatcggacctggcatgatccaacagatgaatactgtttgccctgaatgcagaggatcaggcgagatgataaatgacaaggatagatgcccaagctgcagagggaacaaagtatcccaggagaagaaggtctcggaggttcatgtggagaagggaatgcaacatggccaaaagattgtattccagggtgaagctgatgaagctcctgatacagtgacaggagacattgtttttgtcttgcaacttaaagagcacccaaaattc

SEQ ID NO: 7491 - DNA, 412 bp, Triticum aestivum
  Clone ID: uC-tsrow189020c11b1
ttctctgcctcctccgagacgacgaagccgaccaaagtaagcaacgccgccgacccctcgagtaggggtgaaacaaggcaaagggagagtaatgtggcgtcgctgcatttgctgtcaagccactgagtttgatgagaatgaaaatgggcgtgccaaggccaaggccccaacaaataacgtagatggaatgaaaaagggtttgaaagattctgctactgtgaaagccgagccacaagattcagctccctctatcaatattcctgttctatctttggatgaattaatagaaaagactgatgattttggggcaaaggctttaataggcgaagggtcttatgggagagtgtactatgctgtccttgatgatgggacaaaaatggcagtgaagaaactcgatgctactgaaaatgag

SEQ ID NO: 7492 - DNA, 407 bp, Triticum aestivum
  Clone ID: uC-tsrow189020c12b1
tcgtcgagagccagcgagcgagggatcgagcgatggcggcggcggcgctgcgggggatcggcgcgaagctgtcggcgaacccggagaaggtgacgagcgcgctgctgctgggctcgttcgtggcgctggcgttccggtcgtcggagcagcagggcgagatcgacgagctggaggcccgcaagtcctccctccgcgccgccaactccgccatgtcctccaccatgtgggcctggagggaggagctcgtcaagctcgccgccatgccctccccgcccatcaccgccgcccgcctccgccacatctacggcgaggaggacctcgccgtcccggcgcccaagccgtcaggcccggatgccgaggaggaacatgttcccctaaaaatatcatgaactcttccccgatgcttg

SEQ ID NO: 7493 - DNA, 440 bp, Triticum aestivum
  Clone ID: uC-tsrow189020d01b1
ttttaattagcgctcgtcacccccaccattgcctcgcagcatcacaagtgtccctcccccatcttcttcctccccgcaactcgctgctcctcccagaaccgaagctcagtcccgtggccacgcagaacaaaatgcagcgagcaattcaagctatcggatcacatggcagtgtgctcaaatctgctgtcctgcaacacatcagtgttgtgaagcctgctatgctgcctgctgtgttcccgcgcttcatgtcagtatcacctgctcaaatagaggagagtggatttgagagcagcactgttgcggacattttgaagtccaaagggaagagtgctgatggatcatggctctggtgcaccactgatgacagggtctatgatgctgtcaaatcgatgacacagcacaatgtgggagtttggtgggttgttaaacccggggaagat

SEQ ID NO: 7494 - DNA, 102 bp, Triticum aestivum
  Clone ID: uC-tsrow189020d02b1
gcccctctcctccgcctccggcatcgccagccccctgtaggtgcgtttccattcccaagaacctgagctcccccgtgctcgtcagcgcaaggtgggtggagc

SEQ ID NO: 7495 - DNA, 393 bp, Triticum aestivum
  Clone ID: uC-tsrow189020d03b1
ttctttccattccgtgtggcgaccgagcgaaccctagccgagattagactaccatccccaatctaccggaggaggacgaggacgacgccgacgagatgctgagggttgcggggaggaggctctcgtcttcgctctcctggcgccccgtggcgaccgtcggagccaggggcccgctcgctggcgccggcggccctgggagagacgacgacgacggttcggcctaccagcggcggttcgccatcgagtcccccttcttcaccgccgcgagagggcttttcttcagctgaaacacttgttccacggaaccaagatgctggggttggctgaactcccagccactgttgctgcactgaagaaccccaactcaaaaatctttatgaccagtacaccatg

SEQ ID NO: 7496 - DNA, 412 bp, Triticum aestivum
  Clone ID: uC-tsrow189020d04b1
tttgctcggcatcgcctcgacgaacctgcgcaagcctctgccgatccgcgaggtcattgctcgcatcgtcgacgggtcgcacttctccgagttcaagcgcgactacggcacgacactcgtcaccgggttcgccagcatctacggccaccgcgtaggcatcatcgccaacgacggcatcctcttcgggacctcgtcccagaagggcgcccacttcatcgagctctgctcgcagcgcggcatccccctcgtcttcctgcagaacatcagcggattcatggtgggcaaggactctgagcgcgacggcatcgccaagcacggcgccaagctcgtcacggcgttcgcgtgcgccgacgtgcccaagttcaccgtcgtcgtcggcggcagctacggcgccggcaactacggcatgtgc

SEQ ID NO: 7497 - DNA, 337 bp, Triticum aestivum
  Clone ID: uC-tsrow189020d05b1
agataatccccataccatagccaaaccattccccgtacactagccacgcactatccatacaatagtcttcgagctttcagcagcagcaacggccgagcgcctgcgcccgcggccccgtggctgctcgtcgtgactcccacccgcggcgccggagccgctgcgccccggccatgtcacggctgcttgctccgcccccagcgcgggtggactgctgcgcccatgtgcagaggccggctgttccgcgcctgtgtcccgcgcgtcgggcctaatcccacgccgtctccgctcccggccggttccacgcctcccaggcgctggctgccggctccacgcacca

SEQ ID NO: 7498 - DNA, 378 bp, Triticum aestivum
  Clone ID: uC-tsrow189020d06b1
ttcctcgcgtccgcggacgcgtgggttccaccatgcaccggggcaagaagacgaggaaaacagaagaagggagaatcaggcggtggaagtagcacgacacggaggagccgaaccaagggggccgcccggtgatgtcggacgaaggggaggacgcgcccgtggcggcggtggcggcgggcttcgggctgccggaggagctggcggccgtgctgccggcggacccattcgagcagctggacgtggcgcgcaagatcacctccatcgcgctcgcgtcccgcgtcggccgcctcgaggcggaggccgcggggcttcgcgcgcagcttgcccagcgcgacgacgccgccgaggacctccgcgagcgcgtcgagcagctcgagt

SEQ ID NO: 7499 - DNA, 451 bp, Triticum aestivum
  Clone ID: uC-tsrow189020d10b1
ttctccccctgcccgtcctcgacctcgccgccggccagcgatggagcggcgatccaccacccgcttctcgccatccgagattgcgaggatggagaagttggtttcatcagacagaaaagagcaagtcttggttgatagtttctgccagaagcttgtagaagaatttaatcgttctccagctcgagtcggaagcagagctctacaggctacacaggttcgaggatggttccttgataagctccctgcatcaactcctaaacctgcttccttgcctactacttctgaagaaaagcctttagcctcagaaccagatgcgttagtttctgagataaagacttcagcttctgaagaaaaagctttagctcttgatacaagtatttcaaacaatgaggatgcactttctccagatttacccaaagagactacagataaggttcctgaatttgaagac

SEQ ID NO: 7500 - DNA, 382 bp, Triticum aestivum
  Clone ID: uC-tsrow189020d11b1
tggtcatttggcggagcaaagccgatctgcccgacgaactcatcttccacataaactatctaggaacagatcagcccacgttcacactgaacttctccaagggcgctagccagatcattgcgcaatactatcagctgatccgcctcggcttcgaggggtacaagcacatcatggagaactgcaagctgaacgcggcggtgctgaaggagggcatcgacgcgacggggcggttcgacgtgctgtccaaggcggacggcgtgccgctggtggccatcaggctcaaggacagcaccaacttcagcgtgtttgacatctcggagaacctgaggcggttcgggtggatcgtgccggcctacacgatgccggcggacgctgagcacgt

SEQ ID NO: 7501 - DNA, 427 bp, Triticum aestivum
  Clone ID: uC-tsrow189020d12b1
tggaacaacaagaagttgcttggtcgcgtgagggcatttgatcgtcattgcaacatggttcttgagaacgtcagggagatgtggactgaggttccaaagactggtaaaggcaagaagaaggctctcccggtgaacaaggacaggttcataagcaagatgttcctccgtggggattcggtcatcatcgtcctcaggaacccgaaatgagtttgacgactcggcgtaaaccagaagagtctgttttcgctatgctgctgttagtttgtatgccgaatgctctggatcagggagtgtgtaagagacagttatcaagcaagcattgcctgtactgattaatggtttggtgctgtagtctggatgttatgaattcacgtctttgtagtatctaatctaacaacgtgcactggtagcctctgtttggatcatc

SEQ ID NO: 7502 - DNA, 443 bp, Triticum aestivum
  Clone ID: uC-tsrow189020e01b1
tttttctctcccttctcttaaaccaatcagacgctagaatccttggcaattcgccgctcctccgatccgttcgtcgccgccgggatcgaccatgtcgtacgcctacctcttcaagtacatcatcatcggcgacacaggcgtgggcaagtcatgcctgctgctgcagttcaccgacaagaggtttcagcccgtgcacgacctcaccatcggcgtcgagttcggcgcccgcatgatcaccatcgacaacaagcccatcaagctccagatttgggacacggctggccaagaatcattcagatctataacaagatcatactacagaggtgctgctggtgctcttttggtttatgatatcaccaggagggaaacttttaaccatcttgcgagctggctagaagatgcaagacagcatgcaaatgccaatatgacagtgatgttaatcg

SEQ ID NO: 7503 - DNA, 363 bp, Triticum aestivum
  Clone ID: uC-tsrow189020e02b1
ttatcattgatatttctgacgttgagaggctgaaagagcagtatgcatgctgcacagaagatcagtcagcctttgaagctatagcaagtacatgccagccagaaactcacactcttccagatggacaggttataacaattgaaaaagagcgctatatagttggcgaagctttgtttcaaccaagcatcttgggcttagaagattatggcattgtccaccagctaattactagtgtttcaaacgtcgcatcagagtaccaaaagcaactgctggagaacactatgttatgtggtggcactgtatctatgactggtttcgaggacaggtttcagagagaagcgaatctgtctgcctccgcgatcc

SEQ ID NO: 7504 - DNA, 440 bp, Triticum aestivum
  Clone ID: uC-tsrow189020e03b1
tagtcatcagaccttgtgatggttccatccacgtcggatatcttgggccaggtcatgcctttagtcggacgagattggagtcagtctggtgttgctcgactcttttctgcaataaaggaaaatggttatcaactgatattccttagcgctagagccattgtccaggcatatctgacaaaaaacttcctcttcaatctaaaacaggatgggaaagttatgcctaatggacctgttgtaatttcgcccgatggattgttcccttcactctaccgagaagttatacgaagagcaccacatgagttcaagattgcctgtctggaggacattaaagcactttttccttctgactacaatccattttatgctggatttggcaacagagacactgacgagcttacgtacaaaaagatgggaatttcgaaggcaagatttttatcatc

SEQ ID NO: 7505 - DNA, 401 bp, Triticum aestivum
  Clone ID: uC-tsrow189020e05b1
tccttcgcgtccgggctccaacggcaaggccccggacttttatagcgatacgaccgccgtgggtgcgttccgcgccgtcagcaagggcatcgtcgtctccgcctcggcgggaaactccggccccaaagagtccaccgccgtcaacgtcgcgccatggttcttgacggtcggcgcgtccactctcaaccgccaattcccggccgacgtcgttctcggcaacggcgagaccttcaagggtacttctctctacgcgggcgagccgctgggcacgaccaaggtaccactggtccacgcaggggacgtgggctcgaaaatatgcgaagaagggaagctgaactccaccgtggtagccgggaagatcgtcttctgcgaccctggcgtgtacgcccgggctgcgaaag

SEQ ID NO: 7506 - DNA, 398 bp, Triticum aestivum
  Clone ID: uC-tsrow189020e06b1
tttttctcgtcccggcgcgcttggagctcgacctacccgcgcgccgcccactatgatcatctccaagaagaaccgcaatgagatctgcaagtacctcttccaagagggggtgctgtatgccaagaaagactacaacctggcgaagcacccgcagattgacgtgccgaacctccaggtgatcaagctcatgcagagcttcaagtctaaggaatacgtcagggagaccttctcgtggcagcattactattggtacctcaccaacgatggcatcgagttcctgcgcaacttcctcaacctgccatctgagatcgtgcctgccacgctcaagaagtctgccaggcctcctggccgcccactcggttctggcccacctggtgaccggccaagggggccacctc

SEQ ID NO: 7507 - DNA, 431 bp, Triticum aestivum
  Clone ID: uC-tsrow189020e07b1
cccacgcgtccgcccacgcgtccgcccacgcgtccgcccacgcgtccgctccctccctccctccaataattctcttctctcctctccgcctccgcaccaccatcggagaaaagccagcgggaaggggggaaatcaatccccatgcccccacccctcgccggaccagatccccggcgggccggcgcggagccttaggcggggatgggcggggaggccccggagccgcggcggctgagccgcgcgctcagcctggacggcggcggcgtcccggaggaggcgctgcacctggtgctcggctacgtggacgacccgcgcgaccgcgaggcggcctcgctggcgtgccgccgctggcaccacatcgacgcgctcacgcggaagcacgtcaccgtgcccttctgtacgccgtgtccccggcgcgcctgctcgcgcgc

SEQ ID NO: 7508 - DNA, 407 bp, Triticum aestivum
  Clone ID: uC-tsrow189020e08b1
tcggacgcgtggggtccggcgagcacctatcttatcttgggagggcggtcgcgatgatgaccatggatctgattggaggatacgggagggcggacgagcaggtggccatccaggaggcggcggcggcggggctgtgcgggatggagcacctcatcctgcagctctcccggacaggcaccagcgagagctcgccggttgggtcgtcggaggcgccggagcagcaggtagactgccgggagatcactgatatgaccgtgtccaagttcaagaaggtgatttctatcctcaaccaccgcactggccacgccaggttccggcgcgggcctgtggtggcgcagtcccagggccccgccgtgtccgagccggcgccggtgagggcgtcttcgtcgaggtccatgaccttggac

SEQ ID NO: 7509 - DNA, 426 bp, Triticum aestivum
  Clone ID: uC-tsrow189020e10b1
ttggccacggcgccgtcgtggaggagatacacgggctcatccgcgtgtacaaggacgggcacgtggagcgcctcccggcgatccccgacgtgccctgcacgtggggctcgacggccgccgggagcggcgtcctcgcgcgcgacgtggcggtcgaccgcgccacgggggtgtgggcgcgcctgtacgcgccggccgccgcggcggggaaggtccccgtggtggtctacttccacggcggcgggttcagcgtcggctccgcggcgtggagctgctaccacgagttcgtcgcccagctccccgcgcgggcgggctgcgccgtgatgtccgtcgactaccgcctggcgccggagaaccggctgcccgcggccttcgacgacgggctcacggcgctgcggtggctgcggcagcaggcgggcagaaacaacg

SEQ ID NO: 7510 - DNA, 427 bp, Triticum aestivum
  Clone ID: uC-tsrow189020e11b1
ttgcgaaaacaaaagcagctcaggcccggcccgatcccggatcttcgccgccggcgacgccggttggagaggtgatgggggaggtgcgcggtgctctatagtatctagtaggtgtagttctagtttttccttagaggagtttggcctagtgccggagattggcgtcatgccgatgaggattttgctgtcggcgcgcccgagccgcgttcggtggttcctggcgatgctcttgttggtggtggcggttggctcgctgctgctggaagcaggcgcgctggaatcctcggaaataagctcgatgtctcccctggtatgcaggaatccccttcgcttgctctcgccgacggcagtcaccatggtggtggtcaagtcgactgttcttgcgaccttccagagcaaatcatcgatggtgcttgagctttggcgc

SEQ ID NO: 7511 - DNA, 411 bp, Triticum aestivum
  Clone ID: uC-tsrow189020e12b1
ttcttctcgcttcgggagactacgaggatgtccacgtccgcctcatgagggcataccctgaggtgtcggagtactggtactttggcgtgctcgtcgtggctgctgctactggcatggccggtatcgatacctacccgacctacactacaatcggcgtcgtgccgtatggcatcatcctagccttgctctttgtggttcctacgggcatcatccgagccatgaccggcgtggaggtcacactcaacgtgctggccgagttcattggtggcatgtgggtccgagggcaatgccctcgccatgaacttcttcaagtcgtttggttatgtaacatgtgcgcatgcactctcgttctccaacgacttgaagctggcccactacctcaagattgcaccacgtcagacttttgccgcg

SEQ ID NO: 7512 - DNA, 379 bp, Triticum aestivum
  Clone ID: uC-tsrow189020f01b1
tttgttctagatctgctgttggtcttaatacaagggttggtgttgctagcttcatcaccttgctggtacagaaggtcatgattaacatcaagccatacacggtgatgttactgaaattactttatactgctgttctggaggaaaggagttctgcagccaaaagggcctttgcgtcttcttgtgctgcagttttgaaatatgccagccaatctcaggctcagaaacttattgaagacaccgcttctctgcatttaggtgaaaaaagttctcagttatctggtgcagttcttattaaatcgtacttgagcaatgcagcagatgttattagtggatacaatgcagtggttatccctgtaattttttcttcaagatttgatga

SEQ ID NO: 7513 - DNA, 386 bp, Triticum aestivum
  Clone ID: uC-tsrow189020f03b1
tatcccccctccgcgatctcaccgagaaaatcctcgaccgaccgaacgacaaggccctctcatcctcctcctccaagatgcagatcttcgtgaagactctcaccggcaagaccatcacccttgaggtcgagtcgtctgacacgatcaacaatgtcaaggccaagatccaggacaaggagggaatccctccggaccagcagcgcctcatctttgctggcaagcagctagaggatggccgcaccctggctgactacaacatccagaaggagtccaccctccacctggtgctccgcctccgcggaggcatgcagatctttgtcaagaccctcaccggcaagaccatcaccttggagggtggagtcctcggacaccatcgacaatgtgaa

SEQ ID NO: 7514 - DNA, 441 bp, Triticum aestivum
  Clone ID: uC-tsrow189020f04b1
tctttcttctctgttgccccttccgatcctctccgtccctccctccctccccaagaaggaaggccggcggcgccatggcctagacggcgtgggagctcgccgaactattcgtcctccgccccatcctcgtcgtcttcttcgccctctcattcatcctcctgagtacgtacgacgaccgcctccttttttttctttctttcgtctggctggtttccagattgagatccctcgggttggtatgtggcatggaggacggtgctggtgcacgtcccgctcgtgcaggaggtcgccggcctgcgcccgaagaagaagcccgccaagcccaagccccccaaccgcggtcgcatcggcaggttctatcagtcgcaagcacaagcacagaggtgaacgaagcctcttctcatttggaaattggcttgatgccaacaattggcaacatca

SEQ ID NO: 7515 - DNA, 422 bp, Triticum aestivum
  Clone ID: uC-tsrow189020f05b1
ttatcaattggtgtctcagaaggcggacatcgccgagaggatgatcatccccttggtggagctacaaaaggccacaaacaatttcgacaaagctcgcgagatcggtggaggagggcatggcacggtatacaaagggatcatgtcagacctgcacgtcgtggcgatcaagaagtccaaggtcgcgatccagagggagatcgacgagttcataaatgaggtagccatcctctcgcagatcaaccatcgaaacgtggtgaagctctttgggtgttgccttgagacggaggtgcctttgctggtgtacgagttcatctccaatgggaccctttaccatcatcttcatgtccaagaacccgcgccatccctgacatgggaatatcgggtaaggatcgcaaccgaaactgcgagagctctcgcctacc

SEQ ID NO: 7516 - DNA, 331 bp, Triticum aestivum
  Clone ID: uC-tsrow189020f06b1
ttttacgcgtccgcccacgcgtacgtccacgcgtgcgcccacgcgtgcgaattctttaggcttgcacacctccaaaatctgatgctggggacatggagtcaggtgcgggaaaatctggctcgatgttgcaatcgaagactgatgataccacaggtcacttggcaactaatgtatcctctttcaaggttcagcctgatatatgtggaaaaagtcctgatggtagtcgaaaaggtcaggatatgccactggtgacctattcagaatgggagagtggcgcgccatatctggattttgtgaggaggcaatacaaagtatcacaggcagtgaatgg

SEQ ID NO: 7517 - DNA, 405 bp, Triticum aestivum
  Clone ID: uC-tsrow189020f07b1
tctccacgcgtccgtgtccaacggggagctgtcgcagccgcaggcgggggagtacggcctcgccgtcatgcgccgccggcccaagaccaagatcgtctgcacgctcggcccggcctcccgctccgtcgacatgatcgagaagctgctgcgcgccggcatgtgcgtcgcccgcttcaacttctcccacggctcccacgactaccaccaggagacgctcgacaacctgcacgccgccatggaccgcaccgggatcctctgcgccgtcatgctcgacaccaagggtccagagatccgtactggatttttgaaagatgggaagcctatccagttgaggaagggccaagaaattgtgatctccacagattatagcataaagggggacggcaagatgatatcgatgagcta

SEQ ID NO: 7518 - DNA, 250 bp, Triticum aestivum
  Clone ID: uC-tsrow189020f09b1
cggacgcgtgggcgggaccccgagctcttgcggatgggttgcctgcggcgccggccggagccggcggccatcgacatcacctgggtgtcgtgccggggcgtcaggtcgtggctcccgttccacacgccgtgcctctacgcctacgtactgcgtgacgccgtcgtctgccggcaagaacgtccgccgccaccgcgtcaagacccccaccgaccgggccggcggcgagaaccccaagtgggacgagcgcctg

SEQ ID NO: 7519 - DNA, 449 bp, Triticum aestivum
  Clone ID: uC-tsrow189020f10b1
tcgacagcccccactttccaacttagggttctagggtttctccagcagcgccggcgcctccacccgcctacccaaccaccatgacggccgagaccgcgaagcaggcggagctgctccgcgccgtcctggatgagcagaagctcgcggcgcagggagatgagcctgtagttgaggatgatgatgatgaggaagatgaggatgatgatgacgaggatgacaaagacgatgatattgaaggagttgatgcaagtggaagatctaagcagagtaggagtgagaagaagagcaggaaggccatgctgaagcttggcatgaagactatcactggcgtgagccgtgtaactgtcaagaagagcaagaatatcctgtttgtcatctccaagccagatgtattcaagagccctgcctctgacacctatgtcattttcggtgaggctaagattgaggat

SEQ ID NO: 7520 - DNA, 448 bp, Triticum aestivum
  Clone ID: uC-tsrow189020f12b1
tcttccacgcgtccgcctccaacctctctggtggccgcaatccaagtcttgactatggcttcaagggtgccgagatcgcaatggcgtcatactgctcggagctccaattcttgggcaaccctgtgaccaaccatgtccagagtgcggaacagcacaaccaagatgttaactccctcggattaatctcagcccgtaagactgccgaggccatcgacattctgaagctcatgtcctctacatttttggttgcgctgtgccaagccatcgacctgcgccacctcgaagaaaatgtcaagaatgccgtcaagaattgtgtcacaagagtggctaggaagaccctgatcacaaatgacatgggtggcctccacacgcacgtttctgtgagaaggacctgctccaaacaatcgaccgcgaggcggtgtttgcatacgcagacgacccttgcagc

SEQ ID NO: 7521 - DNA, 328 bp, Triticum aestivum
  Clone ID: uC-tsrow189020g01b1
gacttcaccactgacatgtctaggtcccttgtgaggaagtggcagacactcattgaggctcatgtggatgtgaagacaactgacaactacatgcttcgcatgttcgccattggcttcaccaagagacgcccgaaccaggtgaagcgcacttgctatgcccaagcaagtcagatcagacagatccgccgcaagatggttgagatcatggtcaaccaagctgcaagctgtgacttgaaggagcttgtgaacaagttcatccctgagggtgatcggaaaggagattgagaaggctacctcaagcatcttccccctcagaaacgtgtacgtc

SEQ ID NO: 7522 - DNA, 414 bp, Triticum aestivum
  Clone ID: uC-tsrow189020g02b1
tcctgatctgtctgtcatcgtttctccccccactccgaatccctccctcctctctccgtgaaggtcctcaccgacgtgcccgccgccacggccctccctccaaatcgtcgccgacccgagaatctccgttcaacagcaaggtcatggcagaaaccatagatctaacaggggatggaggcgctcttaagacggtggtcagaaaagcaaaggatgatgctataagcccatctgatagccttccattggttgatgttcattatgaagggacacttgctgaaaatggcgaagtttttgacaccacacatgaagacaattctattttttcatttgaagttggccagggagctgtcattaaagcatgggatatagccttaagaactatgaaagttggcgagattgcaaaaataacatgca

SEQ ID NO: 7523 - DNA, 358 bp, Triticum aestivum
  Clone ID: uC-tsrow189020g03b1
tatcaatcacacccctctcccaagtctcagtttcaatatctaataatctccctgctccttccgtcgcgtcgatcgccatgtcctcctccacggggagcttggaccacgcagggttcacgttcacgccgccgcccttcatcacgtccttcaccgagcttctgtcagggtccggcgccggcgacgcggagcggtcgccaagggggttcaaccgagggggccgggccggggcgcccaagttcaagtccgcgcagccgcccagcctgcccatctcgtcgcccttctcctgcttctccatccctgcgggcctcagccctgctgagctgctcgactcccccgttctcctcaactactcccatat

SEQ ID NO: 7524 - DNA, 443 bp, Triticum aestivum
  unsure (1)..(443): unsure at all n locations
  Clone ID: uC-tsrow189020g04b1
ttgtatcccctcctcacttcgcccctccccctctcctatttcttctctccgggccccgggccaaaattccatcctaagttccatcgaagagggcggcaaggggcgatccggatagcgcaagagcgaccatggcctacgtcgagagaggtgttgtgaaaggcaaacggacaatctggagactaagcataatccccgacttctttaaggctattgtgaacttcatcagaatgttcttcctcacaatgttttctatcgagaaaacagacagctataagaaaggatatggtagtggtaagaaggcgattggtggacctggggngggaggtcctggtgggggtccaatggtgctggggccgcgtggncaaggtggccctcgcggtcctcgcacactatctgacctccgatcaaacgatcagagttccctccctgcttgtggatcctgc

SEQ ID NO: 7525 - DNA, 444 bp, Triticum aestivum
  Clone ID: uC-tsrow189020g05b1
ttcggccggccggcaccgtcgtctagctctcacactcgccccgttgccctgtgcagcagcagcagcagcatcatggcgcggtcggagcagcaggggctgcaggtgctgagcgcgctggacgcggccaagacgcagtggtaccacttcacggccatcgtcgtcgccggcatgggcttcttcaccgacgcctacgacctcttctgcatctccctcgtcaccaagctcctcggccgcatctactacaccgacctctccaagcccgaccccggcacgctgccctccggcgtcgccgccgccgtaacggcgtcgccttctgcggcacgctcgccggccagctcttcttcggctggctcggcgacaagatgggccgcaggagcgtctacggcatgacgctcattctcatggtcatctgctccatcggctccggcctctccttcgcgcaca

SEQ ID NO: 7526 - DNA, 444 bp, Triticum aestivum
  Clone ID: uC-tsrow189020g06b1
ttggacgcgtggcaacatagtatctcctggagcagacatgtctatatattttccattcactgaaaaggacaagcggctcactgcccttcatggttcaattgagagcttgatttatgacccagagcaaaacgatgtacacattggacatctggatgaccgatcaaaaccaattctcttctccatggcaagacttgaccgtgttaaaaacatgacaggactagtggaagcttatagtaaaaatgctaagctaaggtcgctggtaaaccttgttgtggtcgctggctacaacaatgtcaagaaatcaaaggatagagaagagatcgcatagatgcagaagatgcatgaacttattaagacatataacttgtttgggcagttccgctggatctctgcccagacgaacaaggctcgcaacggtgagctgtatcgctacattgctgatac

SEQ ID NO: 7527 - DNA, 320 bp, Triticum aestivum
  Clone ID: uC-tsrow189020g07b1
ttaggtgctgcaccaggacatgaaggtcgccgccgtgaactcccagtactggatgagcgtgaccaccctcatgccgctcctcggcggcttcctcgccgacgcctacctcggccgcttccgcaccgtcctcctctccaccgtcgtctacctcctcggcctcgtcctgctcgcggtggcgcagctggcaccgggcctcaggccgggcggcgtctccgtgccgcgggttcacgagacgctcttcttcgtggggatctacctcgagtccgtcggcaccggcggtcacaagccggcgcttgagagctgtggcgccgaccagttcg

SEQ ID NO: 7528 - DNA, 324 bp, Triticum aestivum
  Clone ID: uC-tsrow189020g08b1
cccacgcgtccggagaaggtcatgcgtgcacttggtgactacttgggtgtgaaggttcatgcctgtgttggaggaacttcagttcgtgaggaccaaaggattcttgcaagtggagtgcatgtcgttgttggtacgcctgggcgtgtgtttgacatgctccgtaggcagtctctgcgccctgacaacatcaagatgtttgtccttgatgaagctgatgagatgctttcccgtggtttcaaggatcagatttatgacatcttgcacctgctcccagggaagattcaaagttggtgtcttctctgctaccatgccccctgaagccct

SEQ ID NO: 7529 - DNA, 66 bp, Triticum aestivum
  Clone ID: uC-tsrow189020g09b1
tcgtggacgcgtgggcgccattggtgtgaactacggcatgatcgccaacaacctgccgacgccggc

SEQ ID NO: 7530 - DNA, 438 bp, Triticum aestivum
  Clone ID: uC-tsrow189020g10b1
tcgctcgcagagagatcgggtcggggaggaggaggatgacgggcgggcgcgcggtgctcctgctggtggtctcggcgctgttcgcgcagatctacgcgtcggatccgctgtttcacgagtccttcgacgagggcttccaggggagctggatcgtctccggcaaggaagagtactcaggtgtatggaagcacgagaagagtgatggccatgaagactatggtctccttgttagcgagccagccaggaaatatgccatagtcaaagagcttgatagccctgttactttgaaggatggaacagttgtcctgcagttcgaagtgaggcttcagaatggccttgagtggtggaggtgcttatcttaagtacattcgccctcaggaggctggatgggatgccaaggaatttgacaatgacactccttacacaattatgtttggt

SEQ ID NO: 7531 - DNA, 389 bp, Triticum aestivum
  Clone ID: uC-tsrow189020g11b1
ttcacgcgtccgcccacgcgtccgttcaggatggaggcgagaacggatcgcgccgaccgaggggccgcccggccgggtccaagaacaagccgaagcctccaatcatcattacgcgggacagcgctaacacactccggacgcacgtcatggaggtcgcgggcgggtgcgacatctccgagagcatcacggcgttcgcccgccgccggcaacgcggggtctgcgtgctgagcggcgcgggcaccgtgaccaacgtcacgctgcggcagcctgcctcgcaggcgcggttgtcgccctccacggccggttcgagatactctcactgtctggctccttcctaccccctccagcaccaccggaagccacggggctcaccgtctaccttgccggcg

SEQ ID NO: 7532 - DNA, 424 bp, Triticum aestivum
  Clone ID: uC-tsrow189020g12b1
gaaccggaccctgtccaagtgcgacgagctcgtcgcgatgggtgccgccgtcggggacacgccggcgtccgtcgtcgctaagtgcaagtacaccatcgccatgctctccgatcccagcgccgcgctatccgttgttttcgacaaggatggcgtgctcgagcaaatcggagagggcaagggctacgtggatatgtccactgttgatgctgcaacttcttgcaagataagcgaggcggttaaacaaaagggcggagcttttgttgaagctccagtttcagggagcaagaagccagctgaagatggccaattggtcattcttgctgcaggcgacaaggcactatatgatgatatggtccctgcatttgatgtacttgggaagaagtcattctttctgcgggagatgggaaatggagcaaagatgaac

SEQ ID NO: 7533 - DNA, 223 bp, Triticum aestivum
  Clone ID: uC-tsrow189020h01b1
ccacgcgtccgacgagaaaggctcaccgtggaaccgatcgaatcgcagcgaagcagcggcggcggcggcgatggggatcggcgagcactttgagggcgtgaagcagcactgggcgcgcaacttcgccttcctcgactacttcaagaaggtctacggccgcgaccagcccctccccaagtggtccgacgccgacgtcgaagagttcatcgcctccgaccccgtc

SEQ ID NO: 7534 - DNA, 209 bp, Triticum aestivum
  Clone ID: uC-tsrow189020h02b1
tgacttgtggtgcccatagatgtgaagaagaagccatgggagcagaaggttcgtctccataaccgctggcatccggatatccctcctgttgctgatgtaactgaaggggaattattccgtgttgagatggtctattgcactggaggaccgattagagatgatgactctgcagatgatatcaaatttctggacctcaaaattactcatta

SEQ ID NO: 7535 - DNA, 237 bp, Triticum aestivum
  Clone ID: uC-tsrow189020h03b1
cggcgtcatcctcagcacccgaatcccgcaaccaaatttcgaactcgccaccggccgaaaaaggattccacgggatcgaaagcaacagcctcgatccatacatccagcttttctgaaagcacaagggggttaaaaccctagctggattgggcggcggggcccttccgccatttgcccgctgctagagtagttgcgtgctccagagacttccagttcgtgttcgtggggcggcggcgg

SEQ ID NO: 7536 - DNA, 290 bp, Triticum aestivum
  Clone ID: uC-tsrow189020h04b1
tttgtcgcgtgggccaaatttggataatcgtgctagtgctctcctgcaaaaggaatatgccaatctgagtggaaagagctcaaaagccaaaggaggtgctagccaaaaagtcaataatgaaaatggtggtgctcgatcgtttaaaggccggcaaaaagatgcaaaaccacaagaggatattaagtcaaacaaagatgacattaagaaacgcaaggtagtggaagaagctgaagcaagagaagagggtgaaatttcagagtctgaagaacagattaaatatcgtttggaaa

SEQ ID NO: 7537 - DNA, 195 bp, Triticum aestivum
  Clone ID: uC-tsrow189020h05b1
ttctttcgtccggttcaacaagatcatcaagcgcggggcgcgcaagggcgcgcgcggccacgacgcggcggcggccgagcccagaggcgcggccccgtcctcctcctccggcggggcggcgcccgtcaccgtcaaccacgcctcccgcgcctccgcctcgcccgtgccgccctcgcccacctcgccgcacgccgc

SEQ ID NO: 7538 - DNA, 244 bp, Triticum aestivum
  Clone ID: uC-tsrow189020h07b1
tcacgcgtccggagagagaccggagatggcggcttccgcgaggcagggggagagggcgaccagcttcgccatggcctgcagcctgctcagccgctacgtccgccagaacggcgccgccgcggccgagctcggcctctgaatcaacaagggtgaggccgaggctcacaggacggcggacaccaagagccctttgcctggggcggagggcgaggaggccggcaggaagaaggagaccatggagctc

SEQ ID NO: 7539 - DNA, 218 bp, Triticum aestivum
  Clone ID: uC-tsrow189020h08b1
cccacgcgtccgcggggccgtctcattcattcccatcatgccatggaccgatcggtttccggcgggagagggtactactactcggcggcgccggtgggcacgggcatgggcatgggcccggtcgcgggccagctcggcgagtggctgctccgggccgtgcagccgccggcgcccacgccgtgcgggtcgcccggcgggccccctatcaccgcgccgcg

SEQ ID NO: 7540 - DNA, 268 bp, Triticum aestivum
  Clone ID: uC-tsrow189020h09b1
atgcatactgcaaagcccttctgcaacttgattttatcaagtggaatagtaaccctgaagaagttctaaaacggatcaatgagtcaactagatggtctgatgagctgcatgattatgagctacaacgcggtttatagtttgataaggtagctctggaggaagacatcaactatggtatgagttcagaattagagaagcatctacaattccctgaccagttgctcatgcgagaatatttcaatagtgtgaaaataaggaaccttgccag

SEQ ID NO: 7541 - DNA, 377 bp, Triticum aestivum
  Clone ID: uC-tsrow189020h11b1
tggaatattggccatcagcagaggaacaaagaaaatatctgttgaattataccaagtcaaaaagaacagtaacaaagaatgtatttcctagcatccaaacacctgagttttatgagaagatagttgttcacacactcagccataatttccgcaatgctacaagacttgatcgtgtgcgattgagattgcccattgaaccacaaggtgcgctagttaaaataatatacgctggtgtaaatgctagtgatgtaaacttcagctccggacggtatttcagtggtagtgctaaagaaactgctgcacgccttccgttcgatgctggttttgaggctgtgggaattgttgcttctgttggagatgcagtgagccatgtcaaa

SEQ ID NO: 7542 - DNA, 274 bp, Triticum aestivum
  Clone ID: uC-tsrow189022a01b1
tgttgattggggagcgtctactgggcggtatcgcgcattcccaagatttgctaaagggagtgtgcactaacatcatacacatgcataacaagaccctcaagttatatactggcaattatgaccagtctgtccaaactcgctctgagctcgaagagaatcaactgaagctgtacaaatgggaacaggaacatatagctaatatgaatgagcacattgcacgatttggtcatggatctgcgaagcttgctcgtcaggctcagagcaaagagaagac

SEQ ID NO: 7543 - DNA, 271 bp, Triticum aestivum
  Clone ID: uC-tsrow189022a02b1
ctcacgcgtccgcccaagcaagcaagctagtgggtagcccagccccagcagagcgatcgtgatcgtgatcgatggagcccagccgccaccgtgtgccggcggcggcggcgctgctcgtgctcgtggcggtggctgccgtcgctgggcgctgtggcgcgcagctgccgatcccggtgaggacggacgggttcctgtacggcgggaagtcggccgcgccggcgtggggcgacccggtggtcgtcgaggccttcttcgaccccgtctgccccga

SEQ ID NO: 7544 - DNA, 471 bp, Triticum aestivum
  Clone ID: uC-tsrow189022a03b1
actccacttcttgagaaggaacatcgcgctgcatcgaggaagttgcgcaaagtcacacaagaaatcagtgatttggacgaagcaaaactaaaggagaaagctcgcctgttccatgattcatttttgacaaagttatctttgctactgaaaggcatggtggtggcacctcctgataagtttggagaaactttaattaatgagaggatcaatggaggaacatttactggaagcgagaatttccagctcccaaacaagatgatggctaatgctggaatgcgtctttacggtggtgcacaataccatcgggcaatggctgaatttcgtctggttgttggaagtattcaagtgccccccgattactagggaggaaatagtcaacgcctgtggtgttgaagatattcatgatgggacgaattactccaggactgcttgtgtaattgctgtggcaaaagcatgcgacacatttgagcc

SEQ ID NO: 7545 - DNA, 318 bp, Triticum aestivum
  Clone ID: uC-tsrow189022a04b1
tgttatagaagatccaccgatcgatcgatctcggagcccggcgcaccgccactcgatccagtcacatacagcgaagaaagattgaaccgccgccgccgccgtcgtcgcgatgaagttgcagacggaggccgtcgccgccggggggcaggggaggctgatgatccggcaggtgtgggcgaacaacgtggagtcggagttccaggcgatccggcaggtggcggagcggttcccgtacgtgtccatggacacggagttcccgggcgtgatccactgccccagcaagcaccacgcgaccctgaccccgtcggtgcggtacgc

SEQ ID NO: 7546 - DNA, 389 bp, Triticum aestivum
  Clone ID: uC-tsrow189022a05b1
tttctggaacaaacaacacacaagataaagaaatccttgaaatcacagcaaagggagctggtgtttttgtcatagtagcttcagttttccttctcctcctgttctacttcatgtcgtcttgggtcgcctggctactgattgtattgttctgcattggtggtattgaggtatttccccgtgtattctctaccttgtgctcgtttgatcacactgcaccgagagaagtatttgtacaaatacttctctcggtgcttggttagttttttgtattttggtattcggctgtgagtttgtttctgttttgtgtgttgcagggaatgcatgtttgcttggtgacaattatctctaggattaataaggattggggaaataatactgtacaattgccc

SEQ ID NO: 7547 - DNA, 346 bp, Triticum aestivum
  Clone ID: uC-tsrow189022a06b1
tgttcatcagcgcccctccgtccctccctcctcctggcgcgtcgtgatccatccagcccaggggcgagaagctagttagcgggtgattaaggtcgccatgtcggactccgaggaccaccacttcgagtccaaggcctatgcgggggcgtacaagaccttccctatgcaggccggcgccatccggaagggcggctacctcgtcatcaagaaccgcccctgcaagggtggtggaggtttctacctcgaagactggaaagcacggtcatgctaaatgccactttgttgacttagatatattcaatggtaaaaagcttgaggacattgttccttcatcccacaactgtga

SEQ ID NO: 7548 - DNA, 475 bp, Triticum aestivum
  Clone ID: uC-tsrow189022a07b1
tcactttcacctcttttttctttctagtttatcctaatgtcaaagcaacaagataaacctgctttgaaacctgctgttttcactactgttgatcagttgagaccaggaaccaatggtcataacttgaatgtaaaggtagtgagttgtacgatcgtgattgaaaagcaacgagctgatggaacaaagatcagagtagctgaggctgtcattggagaccaaactggagttgtcactcttactgcaagaaatgcacaaattgatgtagttgtcccaggtagtacagttgtacttcgaaatgccaaagtagatatgtttaatggttttatgagactagcagttgataaatggggtttagtgaaagctgctccagaacccgctaagtttgaagttaacacagaaaatgatctttcaagtatagaatacgaacttgttactgttgatgatgctcaatgattaaacaagacaagaaatcatg

SEQ ID NO: 7549 - DNA, 424 bp, Triticum aestivum
  Clone ID: uC-tsrow189022a08b1
ttgtccacgcgtccgcccacgcgtccgcgaaccaatggcgatggtgaccgcgaagctcagctccccggccgccgcccggctcgcgccctccgccgggagcgcccgccgcgcctcgcgcgtccgcgtccgcgcctccggcggctcctacgccgacgagctcgtctccaccgcgaaaactgttgcttcccctggccgtgggatccttgcgatcgacgagtcgagtgcaacatgtggaaagagattggcatccattggtttggacaacaccgaagttaaccgccaggcttacaggcagctgttgctgaccactgctggtcttggtgaatatatctctggtgctattctctttgaggaaactctctaccagtccactacagatggcaagacctttgttgatgtcttgaaggaccagaatatcatgcct

SEQ ID NO: 7550 - DNA, 404 bp, Triticum aestivum
  Clone ID: uC-tsrow189022a10b1
cctgctgacgcgtgggattcgatctcggcttcctctccaagccacgcgacgcgagaccagagctccggccatggcggcgacgatccagtccgtgaaggcccgccagatcttcgacagccgcggcaaccccaccgtcgaggttgatgtgtgctgctcagatggaacctttgccagggccgccgttcccagcggtgcatcgactggtgtctatgaagctttggagctgagggacggtggatctgactacttgggcaagggtgtttccaaggctgttaacaatgtgaactccattattgcacccgctttggtcggcaaggaccctaccgctcaaactgagctcgacaactttatggttcagcagcttgatggaaccaagaatgagtggggtttggtgcaagcaaaag

SEQ ID NO: 7551 - DNA, 129 bp, Triticum aestivum
  Clone ID: uC-tsrow189022a11b1
tcgtaacttgttggagcactcctgcagtagagttttgatgtttatttttttcacccatgttttgaattgtggccaggacgacatgtgatggatgcttagataaccaagctgaagaattgtccgttaaaa

SEQ ID NO: 7552 - DNA, 325 bp, Triticum aestivum
  Clone ID: uC-tsrow189022a12b1
ttttggagatcatcaaccaccgctcgctgcgccaccccaacatcatccgcttcaaggaggtggtactgacgccaacaaatcttatgattgtcatggagttcgcagcaggtggggagctgtttgagcgaatctgtgatcgtgggcgcttcagtgaggatgaggcaaggtatttctttcagcagttgatctgtggtgtgagctactgccatcacatgcaaatatgccatagagatttgaagctggagaatgttctcttggatggcagtgcagctccacggctcaaaatatgtgattttggctactccaagtcatcagtactgcattc

SEQ ID NO: 7553 - DNA, 403 bp, Triticum aestivum
  Clone ID: uC-tsrow189022b01b1
tttttgaccaagataattgctgggcctaacggccagacaatatacgctgaaattccgtacaaacagtttcttgatcaagtacaaggaaattggagaaaaaggttgcaaacaccatggagttctcccgagtcactagaggcactgtgccagcaagtgaaaagatgcactgagattgcactgacctgcatggagatcgacagacacaaaaggcctagcatagtggatatcatacacgaccttgaccagaccgaaaaaaatattgaaaatattaattcttatgaacaagatccatcaccgccacttgattcctcttaaatgttgttgaacctgtagcatcagctccacctacaactccatctccaccacctttcctaacccaatcttatattggatcttcaacacc

SEQ ID NO: 7554 - DNA, 322 bp, Triticum aestivum
  Clone ID: uC-tsrow189022b03b1
tttctcgtccgcggacgcgtgggcggacgcgtgggctctgctctgccggccacctaccgctctcccttccgcagatcttccggtcttcgatctcgccggtcgccacgacgccacaccgtgcttgccagcagaagagacgttatcaaggcgctatggctgagccggcggcggcggcgagcacaaggaagctgtacgggtacgagctgtcgtccaattcggtgcgcatcgcggcgctgctcaacgagaaggggctcgactacgagctcgtcgtcgtcgacgacaccaagtcgccggagttcctcgccatcaaccccttgggcca

SEQ ID NO: 7555 - DNA, 411 bp, Triticum aestivum
  Clone ID: uC-tsrow189022b05b1
tttctcgtccgatggactactaccgcgagacctacggcgggtacgggatggcgacgcccgggtacgcggcgccggtgccgtacggcatgtcgcaggtgaacatcgacggcaactgcggcgggcgccccatgccgccgcagccgacggtgaagatctactgccgcgccaaccccaactacgccatgtccgtgcgcaacggcaaggtggtgctggcgccggccaaccccaaggacgactaccagcactggatcaaggacatgaggtggagcaccagcatcaaggacgaggaggggtaccccgccttcgccatggtgaacaaggccaccgggcaggccatcaagcactccctcggccagtcccaccctgtgcgtctggtgccgtacaacccagactacctggacgagtcggtgc

SEQ ID NO: 7556 - DNA, 434 bp, Triticum aestivum
  unsure (1)..(434): unsure at all n locations
  Clone ID: uC-tsrow189022b06b1
ttgttcgcgtgggcgacagtgaagtcagggattatgaagcaggttgaagctttcagatcaggttttagccaggtctttgatatctcatccctccaaatattttcacctcaagagcttgactatctaatatgtggtcgtcaagaaatatgggaggctgaatcactggtagataacataaaatttgatcatgggtttactgctaaaagtcctgccattataaatctactcgagatcatgtcggaatttacccctgatcagcagcatgcattctgccagtttgtaaccggtgcttctcggcttccaactggtggtttggctgctcttagtcccaagcttaccatagttcgaaagcacccttcggtggggtgagtactttgaatcaagcggggtaacggatgccgcggatgacgatttgcncagcgtcatgacatgtg

SEQ ID NO: 7557 - DNA, 476 bp, Triticum aestivum
  Clone ID: uC-tsrow189022b07b1
tttttacactagctagctgaccctcacagacattgttaggtcttgcaagtgaagctaggagacagaaaccatggcggcttcccgtgccttggctgcactgcttgctgtggtggtactcgtggtctgctctccggcgcctcgtgttctcgccactgaccccacccagctccaggacttctgcgttgctgatataatgaaccctgtgattgtgaacgggttcgtgtgcaagaacatgaagatggtgacggcgaacgacttcttcttgcccgggcttaacaagccgggcaagttgaacgctcagggctcggcggtgacaccggtgacggtgcggcagctgccagggctgaacacgctgggcatctcattggcgcgcatcgacttcgggcccaacggcgggcagaacccgccgcacacacacccccgcggttctgagatcccaccgtgatcatggggcagctgcttgtggggttcgtcac

SEQ ID NO: 7558 - DNA, 420 bp, Triticum aestivum
  Clone ID: uC-tsrow189022b08b1
cccacgcgtccgccctcttcgtccgcccacgcgtccggctgctcatcttgttgacagcaccaaccaagtcgggcacttccagcaggtcctcactgccatcggaaacttctgcatcgtctcgattgcagtgggaattgtcattgagatcatcgtcatgttcccgatccagcgccgcaagtaccgtgccggtattgagaacctgttggtcctcttgatcggtggtattccgattgccatgcctacagttttgtcggtcaccatggctattggttcccacaagttgtcccagcagggtgctatcaccaagaggatgactgccattgaagagttggctggcatggatgtgctttgcagtgataagactggcacactcacccttaacaagctcagtgttgacaagatcctggttgaggtgtttgc

SEQ ID NO: 7559 - DNA, 468 bp, Triticum aestivum
  Clone ID: uC-tsrow189022b09b1
ttcttgctctgcccgtccgggcccgtcgtgcgccggccggtacgtgtacatgtacgacctgccgccccggttcaacgccgacctcgcccgcgactgccgcatgctctcggcgtccaccgacatgtgcaggcacgtggtcaacgacgggttcggcccgccgatcaccgacggcggcgcgctccccgagagcggagcctacgccaccgaccaatacatgctggagctgatcttccacgcccggatgtggcagtacgagtgcctcacgcccgaccccgccgccgccgccgcggtctacgtcccgttctacgccgagttcgacctggcgatgcgcatcgacaacagcgacatgtcggcgcggaacgcgctgccgggtgacgttgcggctggctggtgcggcggcccgagtggcgcgcatggggggccgcgaccacttcatgctagccagccggcccacatgggacctgctct

SEQ ID NO: 7560 - DNA, 448 bp, Triticum aestivum
  Clone ID: uC-tsrow189022b10b1
ttctctcacgcgtccgcccacgcgtccgggcatggtgtgcctctaaagggaacatcccatactttgagacttctgccaaggatggaatcaacgtggaggaagctttccaatgtatagtaaagaacgctctgaagaacgagccagaggaagaactgtatatgccggacaccgtggacgtggtgggtggcaaccggggtcaaggatcatcaggatgctgttagaacctgaggccacaactgtcagctattcctttgacattactgtatttccatggtgacttgtggacccgtatttcattcgtgacctttttcaatcacctcgtaagtgcccaaggaatgattgatgcgtctgttccgagctgtcaatctgtggacgtttgtgtagctttatcatgattagcgtcatatcttgtgaatacagtaaggcgaaatagtgaagtgtaaactac

SEQ ID NO: 7561 - DNA, 430 bp, Triticum aestivum
  Clone ID: uC-tsrow189022b11b1
tctttacagccatgatggcagcaagttgaacttcatacctgttctagcatcacgatcccaagcactaaggtacttgtatataaggtggggtgtagagctgtcgaacatgacggtggttgtcggtgaaagcggcgatacagattatgaagggctgctcggaggcgtgcagaagaccatcgtactcaaaggctcgtttaattctgcgccaaaccagcttcatgccgccagaagctattcgctagaggatgtcgtatcgttcgacaagccaggaattgcttccgtcgacggttatgccccagataacctgaaatcagctctacaacaatttggtgccctggagggctagaatcaccaacttttgtcagagtcagcagaggaataagtaggtgtgtggaggcacaccttgctatggggtcgcacacgagacacg

SEQ ID NO: 7562 - DNA, 409 bp, Triticum aestivum
  Clone ID: uC-tsrow189022b12b1
ctcgttgacgcgtgggtacacgacgcgaccgcgagccaaaccctaccgcgaacacgtcggcgatgagctcctccaacggcaacggcgggaagaagccggcaccgtccggcgggcgcgggggcatccgcaccctcgccgacatcaaccgcggcccctccgggttcccaggcgcaggcggcagcggcagcgactccgatgagccccaggagtactacaccggcggcgagaagagtgggatgcttgttcaagatccaacaaggagaaataatgcggactcaatctttgagcaagctagagtgatgggtgctcagcaagttccactgccttcttttgaaggccaatcttccagctcaaccagctttgcaggaacgtgtcgtctgctttaggggatgcgcagacagcaccagct

SEQ ID NO: 7563 - DNA, 198 bp, Triticum aestivum
  Clone ID: uC-tsrow189022c03b1
gataaggacagcactgccaacctatcgctgtgttgttgggaaccccgagggagcgcggctcccaccgactgagcgtctcgcccaccagatcaggaggagctgagggatcccaaccaaggaggagcgcgcggttgggcgcctaatttgagctgattggccggtctgtgcttattgttccagcgcgcgtgctgatccatg

SEQ ID NO: 7564 - DNA, 402 bp, Triticum aestivum
  Clone ID: uC-tsrow189022c04b1
tgcacgccagtcgcccttcttccgtgccctcgcctcccccgtcccgtcccaccgcggcggcccccacttcgcctctcccccaccccgcctggccgcacccacctcccggcgaaaaccgcccccgccctcgcccccgcttgggtaagaaacgagagggaggagggtcccgacgaaacccgcccccgcccttgcccgggttcagctcccatggcggctcggcccccaccgcctactccgcctctcccgtcgcctccacgcctccgccggccccggctccggcgccggcgaaggcaaattgcttctacccggcgtctccagatcgatactaagcatggacaagtctgcctgatcccaatcaaaatagtgtgtctgtcaccaagtggacgagaaggagatgcatat

SEQ ID NO: 7565 - DNA, 350 bp, Triticum aestivum
  Clone ID: uC-tsrow189022c05b1
tgttttttcctcctcaacccgccgccgcttctcctcctccggaagaaaaacagagagcttcaagttctccggagcgagagagatggcggcgaagggcgatgggccggcgatcggcatcgacctcggcacgacgtactcgtgcgtcggcgtgtggcagcacgacagggtcgaaatcattgccaatgaccagggcaaccgcaccacgccgtcgtacgtggccttcaccgactccgagcgcctcatcggcgacgctgccaagaaccaggtggcgatgaaccccatcaacaccgtcttcgatgccaagcgtctcattggccggagatttaccgattcaactgtccagagtgaca

SEQ ID NO: 7566 - DNA, 421 bp, Triticum aestivum
  Clone ID: uC-tsrow189022c06b1
tgtttctcgtccgcagccatggagctcctcttcttttgcacaatagttctcatcctcattgtctcatccgtgtaccttctgggcctcttagccgacggtcgtcgcaacctgcccccaggtcctcgctcgcttccactcgtcggcaacctcctctcactgggcgcccaaccgcaccgctccctcgcgcgcctcgcggagagccacggcccgatcatggcgctccgtctaggcacggtcaccaccgtgctcgcctcctccgcagacgccgcccgcgacatcctccagcgccatgacgccgctttttccgggcgcttcgtcctggacggtcccacgtgtcggcgcactacacgcacccatggtctggctcccggccagcagccccggtggcgcgcgctacgcaaggtgtgtcgggtgagctctc

SEQ ID NO: 7567 - DNA, 377 bp, Triticum aestivum
  Clone ID: uC-tsrow189022c07b1
tctttccaaggcccagcccacagatatatacgctttcggaaagtgggggttggtttcgctttgagctttttatccggggcagccaggcagccaggcagccgccgggccgggacttccgctctgttacgcgtccagaggctagatagctccgtccgtccgtgtccgattccgccggggccgggcgtggatacctaggctaggcgaggcgaggcgccgccgatgtcggactgcagcaccggcacggactcgccgcgggccgactccgtcgacgagcagccgcccgccgacgccgagtcgcccggcgttggccagagcaagcgcgaccacccctcgccgtcgtccccgctgccgccgcccaagcgcagcggagatccgtg

SEQ ID NO: 7568 - DNA, 410 bp, Triticum aestivum
  Clone ID: uC-tsrow189022c08b1
tttgctattcacttgaattagaaacacagaaggtttgggattatgctggtgacaactatgtccatcgtttgattcagtccaaaacagatggtaaactggttgagtacaattgctatggtggtcatgaagcagatggtatctgttctatatgcagtggtgatgcaggaatggatgaagctctactaaacagtaaagttgaagctattgttgaagagtacaatgatctcctcacgtctcagcttgacaaacaaagaaattactatgagtcacttctgtcagaagtcaaagaggagaatgagaaagaaatttctgcagccacttcgaaatctgtgagcatgatgaaactccaaaagttacaggcaaagcttgataagtgccttgaaagaaaagttttcttgatgatatcaata

SEQ ID NO: 7569 - DNA, 450 bp, Triticum aestivum
  Clone ID: uC-tsrow189022c09b1
ttttacgcgtccgctccgtctcgtcctccgccccgccgcctctacgtcatctctccgctcgtctcctcgcctacgacgcagatcccctactcgattgcctccgcccgagcagccgtgcccgagagcccgcccaccgccccacgccctgacgccgctccggttcgccgccgaccgcagcagccgagcgagcgagcgagaggcaagatgcctaagcggacgacccacacgtactcgagcgaggacgcgctgccggagggccccgagtccgacctcttcgtctactactgcaagcactgcgcctcccacgtcctcatcactgataccctattgcagaaaatgccaaagaggaagaccgaccgagcacatgttctagataaggcaaagcatcttgcgagggtaaatgtgaaagatgcaggaaaactcttgtgaaacgtggagaaggaaagctcg

SEQ ID NO: 7570 - DNA, 385 bp, Triticum aestivum
  unsure (1)..(385): unsure at all n locations
  Clone ID: uC-tsrow189022c10b1
tttctttgctctgctgccgtgccaacaagggtaaaaggtaggcgccgcgccacgccatgggcgcccctcgcgcctgaccatgcactccaggctgctcaagaggctcgccaagaggatcatgtgagccgccgcgcgcccgtggaaatgtgggagatggacgcgctgctctactgcgcggtcgtcgcgctggcgcttcactgcgtcggctgtggctgctcggcgatcaaccttgaaggctcagcgctgctcaagttccagtccagggtggaggnaggatccgcatggcgccatggcaggctggagcgcgcgggacgccgaccttgcggttggaacggcatccgctgcgccgatgacagggttgtgatgctgaaccaaaagatctctc

SEQ ID NO: 7571 - DNA, 367 bp, Triticum aestivum
  Clone ID: uC-tsrow189022c11b1
tcttcccgtaggtgattgcacgggtcgttgatgtggtcgcggtggtggttggcgtgcatcggtggggtgcgggtggtggtggctcctcccttctcctgggctcgggtcggcggcgcgagttgttcgcgtggcagagatggccacgacatggggctcgtgctcgggcggactagattgaggcccgagagttggagctttcgctctgggtaggcgatggtgggcttggtgcgggtggtgcccacgggcgatgaggtccctctccttgcgggtgcagtgttcgatggtggtggttgggactccgctgttctatcgggcagatctgtgtcgatggccacggacatggcattgtgagcgtgcttggcagcgg

SEQ ID NO: 7572 - DNA, 453 bp, Triticum aestivum
  unsure (1)..(453): unsure at all n locations
  Clone ID: uC-tsrow189022d01b1
tttttagcctctccattccgtgtggcgaccgagcgaaccctagccgagattagactaccatccccaatctaccggtggaggacgaggacgacgccgacgagatgctgagggttgcggggaggaggctctcgtcttccctctcctggcgccccgcggcgaccgtcggagccaggggcccgctcgccggcgccggcggccctgggagagacgacgacgacggttcggcctaccagcggcggttcgccatcgagtcccccttcttcaccgccgcgagaggcttttcttcggctgaaacacttgttccacggaaccaagatgctgggttggctgaactcccagccactgttgctgcactgaagaaccccaactcataaatcctttatgaccagtacaaccatgaaagatatncctctggagatcccacaagcgtgcctttgcctactttgtctgagt

SEQ ID NO: 7573 - DNA, 355 bp, Triticum aestivum
  Clone ID: uC-tsrow189022d02b1
tttgctgccgttgtcgacgcgaagccgcaagccgtggagaacaaatgggtgtcgcccaagagcacgctggacgcggcattctgggagtcggagtctgacaccgacgaggcggacgacgagccgtctcacggcgcggccgagaggaggatcagcgcattggcctgccctgcgtcggcgctccccgactgggactccgacgagggatggatcgacgtgctctccgggccaacggaagcagttgccgttcccgccaaggtgacgtgtggcatcatcgtggacgacgcgatcaccagtgaagaggagtcaatcgacccagagtccggtgctctcgacattaccgtggacgtggagtaca

SEQ ID NO: 7574 - DNA, 478 bp, Triticum aestivum
  Clone ID: uC-tsrow189022d03b1
ttttcgcgcgcgccctcgatcggatcggaacccgtcgaggaaccgcgagggagctcgatccgatcgcgggagcgccgcgcccaccagatcaggaggagctgagggatcccagccaaggaggagcgcgcggttgggcgcctaatttgtgctgattggccgatctctgcttcttgttccagcgcgcgtgcggatccatggaatcagcatcggagaggactggcgctatggattcaccggagccaagaatcgaggatgagaaaactgttaaacccaccatttcacttgattcaagtgttatcaatctaccaagtgaaggacaagtccaggcggtcacatccaacataggtggggaacatagtgctgcatatccacaacacatttattcatcgcaagcagaaccattctattaccaaggtacaggatatgagaaccttccaaatgaatgcgatgtatatcctcccatacgagtgttgatgga

SEQ ID NO: 7575 - DNA, 317 bp, Triticum aestivum
  Clone ID: uC-tsrow189022d05b1
tggtcgcgtgggcgtctccctctcgcggaatacacaaagcaccggttgatcccaagcggaagagcagtgatggcgcagtccggcaacagcgacgccgccccgatcagcacccagcccgcggcggaggaggtgacggtggggaggacgcccgaggaggaggcggccaggctgaggtacctcgagttcgtgcagcatgcggcggtcgcaggccgtcgtgcttgccgccgcggcctacgcgtacgccaagcagggcgccggcccgctccgccccggcgttgaccacgtcgaggggaccgtcaaggccgtcgtcggccccg

SEQ ID NO: 7576 - DNA, 385 bp, Triticum aestivum
  Clone ID: uC-tsrow189022d06b1
ttgggcctcatcaccttccacagcctccgccgcaacgcgccgctgctgggcctgggcgccatgtccgacgacgacctccgcgggatgctcgccgagggcgacttcgacggcgacggcgcgctgtcccagatggagttctgcgtcctcatggtcaggctcagccccgacctcatggaccagccccgccggtggctcgacgacgccgtcgcccaggcctcccacttcctcttcaccagctaggcggagcatctggtgtcgatcggataggaaattaatcttcttcttcgttgttgttttttcttctctcccccgctgttatagagtcaggattcaagaaaagaaagggcactgtcgattggttgaatgatttcgatgtgtgctctcc

SEQ ID NO: 7577 - DNA, 410 bp, Triticum aestivum
  Clone ID: uC-tsrow189022d07b1
tctttagcaatttccttctcatctgtttttggtagctgtttgccttgcaaactcacggggactaattcgtcaactctggagactgttggatacagcatatttgcctctatttttaatgttggttgggcagttacccaagtcgctcacatgtcaatggtgaactgcatgacgtcaaacccaacaagtcgggttgcactagtgagctgccgcaatgccttcacgatggtcgcaaatcttagcttgtatggcattgctttgttgatatttactctaatgcggtcagtgagtgtattagttcagtatcgttggattgcttatacggccatttccatcggatgttgttttgttgtcgcgttcttgattggaacaaaagagccagggttaaatcaaccttctcaggataagagcct

SEQ ID NO: 7578 - DNA, 449 bp, Triticum aestivum
  Clone ID: uC-tsrow189022d08b1
ttcccgtcgtgctcttctgcgtcatggtcgtgtgcctctgcctcctcttcctctatttctcgggctccaatgggcaggctgggagcgcggcactagagtatggcaccaagttttctcgctcgcttgggtggggcagcgatggagatggcgacgatggctcagacgagtcgatttttgggactggcgatgcaaatgacgttaagctcaagagcttcccggtatgcgatgatcggcattctgagctgatcccctgcttggataggaattcgatatatcagatgaggttgaagctggatctaaacttgatggagcattatgagcggcattgccctcctcctgagaggcgatttaattgcctgattccaccgccacatggctataaggttcccataaaatggccaaaaagtcgcgatttagtgtggaaagcaaatattcctcacactcacctt

SEQ ID NO: 7579 - DNA, 333 bp, Triticum aestivum
  Clone ID: uC-tsrow189022d09b1
tgtctccgtcgtgctcttctgcgtcatggtcgtgtgcctctgcctcctcttcctctatttctcgggctccaatgggcaggctgggagcgcggcactagagtatggcaccaagttttctcgctcgcttgggtggggcagcgatggagatggcgacgatggctcagacgagtcgatttttgggactggcgatgcaaatgacgttaagctcaagagcttcccggtatgcgatgatcggcattctgagctgatcccctgcttggataggaatttgatatatcagatgaggttgaagctggatctaaacttgatggagcattatgagcggcattgccc

SEQ ID NO: 7580 - DNA, 369 bp, Triticum aestivum
  Clone ID: uC-tsrow189022d10b1
tcttgaaaatccaaggctccggggggcggcggcgcccgatccacacacggcacatctcgggccgcgcggcgcacatccacccccctccactctccacgagtctgctcccccaccgctaataatagccgctgctaccaggcgggcggggcggacaccctctgccgccgccatgggagcgctcgaggaggcgcacctcgccgccgtcgccgcctgcgggtgcgacgaggaggaggatggaagatctcctggtggaggtcggcggcggggaggcgccgggggacgccatggagccggcggtgcgcgcgctgctggcggggctcggcgaggacgaccgccgggaggggctgcgccggacgcccatgcgcgtcg

SEQ ID NO: 7581 - DNA, 350 bp, Triticum aestivum
  Clone ID: uC-tsrow189022e01b1
cagactctgaattccattcttcagacaaggaattgggtgataacaggatagaagaggccaggaggaagaagaggttactcatctcgcaatcatcctcagattctgaattccatgtctcagataaggatgtcagggacttgggagaggctaaatctctggtggctcagcccatgctgtctgtgtccccgaggaggctttcttttacaaggaatggatgggacaaaggaaaggagaaaaaagaactagtagatgctgggaagccctggtgtgggatatgcctctctgaggatcagaggacgactctacagggagtgctgaattgttgctcacactacttttgcttcgcgtgc

SEQ ID NO: 7582 - DNA, 373 bp, Triticum aestivum
  Clone ID: uC-tsrow189022e02b1
tttcgaccatgtgaaaacggcaatcaacaatactaagctcacctggctggcgtgtttgttttggttatatcatgcagaactaccactgtcactgggctatgtcccattgctcagggttctgagactttcaaatgctgctcatagtttccacaaaaacgtcaagttgagtacgtttctccatgagacctctgttcgagacctgacgttggggtttaaatgcgaaaaggtttgggttcaaccagagtgtttgaccagaaggcaggcatatgcgttccagcaactaaggattctcaatctagttaaaattcctgaagggtatgatctcacctggacaatgttcttcttggaagcggcgccgtccctggaggagctc

SEQ ID NO: 7583 - DNA, 400 bp, Triticum aestivum
  Clone ID: uC-tsrow189022e03b1
tttctctcgcgcccgccgcctcctcccccaccccctccccaaggagcacaggccccagggaactgccgtcttctccgcgcccacggcaggccgcagaggcaccgccgccgaccccgctcctcctccggcgccagcgccagcctctccgtctccggcccggagatggatcccgccgcgcggaaggatctgtacccgcacgtcgagcccttcgacaccggccgcctcagggtctccgacgtccacaccatctactacgagcagtccgggaaccccgggggccaccccgtcgtcttcctccacgggggtcctggggccggcacgtcgccgggcaaccgcaggttcttcgaccggagttcacaggatcgtgctgttcgaccagagaggcgcctgcaagagcact

SEQ ID NO: 7584 - DNA, 476 bp, Triticum aestivum
  Clone ID: uC-tsrow189022e04b1
tttttcgcgtccgcccacgcgtccgcccacgcgtccgcccacgcgtccgcaaattttaaaaagtttaaagagagatcattgagagcatagagctttatttaataaatttgcagatcgaataagtaaagagaaaaaaagaaatccaaaaaatgtaaatttattttttaaacgtatttgaaaatttgaaaaaatatacctaaaacaaagaaaaaatcctaatatattaaataaattacaaaaatataatcgacatttaaaaaaatttcaaaaattctcaaaaaaaaaaccatatattttattggtaaattgcgctaaatcatatacagataaagaaagtttaatggaacttttaaaagcttcagcaggactaaatccaaaagcaatagcagcatcataaaaaatatggattaaattgccggttcaatatattgaatttttttagtcaaaaggaatgaaaaatagaaattttagaacaa

SEQ ID NO: 7585 - DNA, 372 bp, Triticum aestivum
  Clone ID: uC-tsrow189022e05b1
ttctcgcgtccgagccagaccaaaacctgccggcaacatccaagaccagcggggagcactaccttgacgaccatggcgaccgctcctgtcacggtggtgccgcgcctgaagctgggctcccagggtatggaggtctcggcgcagggcctcggctgcatgggcatgtccgccttctacggcccgcccaagcccgagcacgacatggtcgcgctcatccaccacgccgtcgccgccggcgtcaccctgctcgactcctccgacatctacgggccgcacaccaacgagatcctcctcggcaaggcgctgctggggggcgtgagggagagggtagagctggccaccaagttcggcatctcgttcgccgacggcaag

SEQ ID NO: 7586 - DNA, 330 bp, Triticum aestivum
  Clone ID: uC-tsrow189022e06b1
ttttcgcgtgggtccgccgccgccgcgcctcctcctcgcccaaggtaggagcttgtgaaagttctaaggctgagaagatggttctgaagaccgagctctgccgttttagcggccagaagatttacccagggaagggtatcaggttcattcgttcggattcgcaggttttcctctttgccaactcaaaatgcaagcgctacttccacaaccgcctcaagcctgcaaagctttgctggacagcaatgtacaggaagcagcacaagaaggacatccatgctgaggctgccaagaagaggcgccgcaccaccaagaagccgtactcacggtcga

SEQ ID NO: 7587 - DNA, 408 bp, Triticum aestivum
  Clone ID: uC-tsrow189022e07b1
tctttttgtgactgccatgtcgtcgtcggccatggaagcgctccacgccctgatgccggagcagcaccagctggacgttgaggcggctgcggctgtcagcagcgccaccagcggcgaggagagcggccacgtgctgcaggggtgggccaagaggaagcgatcgcgccgccagcgctccgaggaggagaacctcgcgctctgcctcctcatgctctcgcgcggcggcaagcagcgtgttcaggcgccgcagccggagtcgttcgctgcgccggtgcctgccgagttcaagtgctccgtctgcggcaagtccttcagctcctaccaggcgctcggaggccacaagacgagccaccgggtgaagcagccgtctcctccctctgatgccgctgctgccccactcgtggccct

SEQ ID NO: 7588 - DNA, 363 bp, Triticum aestivum
  Clone ID: uC-tsrow189022e08b1
tttttcacgcgtccgtcctgaataaatttctcgaaattcccaatattagagcaagatttatgagtgacaagttactgtccgaggtgcttgaggccttcttggttattcgtgggctagttgtgcagaagacgaagttaatcaatgactgcaatcggcttttgaaagaccttcttgatagtttacttatagagagtactgcaaacaaacgccaatttattcgtgcttgcatctctggattgcagaagcatgtgaaggagaaaaagagacggacatctctgtttattttggagcaactctgtgatttgatttgcccagtgaaaccagagcctgtttaccttttgattttaaacaagtcacatactc

SEQ ID NO: 7589 - DNA, 309 bp, Triticum aestivum
  Clone ID: uC-tsrow189022e09b1
ttcacgcgtccgcccacgcgtccgagcgagtctactcaaaaaagctaaggaaggatggtggagaagccggcgagccaggccgacgtgggcggcgaagtggaggcgcataaggagaggaaggggctgtggtcgccggaggaggacgagcggctgtacacccggatcaccaggcacggcgtgtccacctggagctccgtggcgcagctcgccgggctgcggcggagcggcaagagttgccggttacggtggatgaactacctccgggcggaccttaagaaggagcccatctccaagcgcgaggaggagacc

SEQ ID NO: 7590 - DNA, 447 bp, Triticum aestivum
  Clone ID: uC-tsrow189022e10b1
ttctccacgcgtccgtccagttctccggcgcgggtgcgcaggtccccgactgcgacggcgacgagcgggacggcatggacgaggccatctgccccgtcgactcgttccagcagggccccatcctggacgacgagatcaaccaggccatcgtccgcccgctagtgcacggtgtcaagctccatgccatcgtcgacgcttgccacagtgccaccgtcctcgatcttccctaccagtgcaccttctccaagcagtacgggtgcttgaggtggatggatgagcgccctctgaatggcgcctgcaaaggcacgagcggaggccaggccgtgctcatcagtggcagcagcaatggaaagacccagatgagcgtgctgcctgagccgaatgcaacgattggcgccctgacgcacagcttcctcaagcagtggagtgcgagccccgcaccaccta

SEQ ID NO: 7591 - DNA, 373 bp, Triticum aestivum
  Clone ID: uC-tsrow189022e11b1
ttttctgtctttttcttcacttccccctcgccttctcctgccctcccctcctgatcggagtctcagccgcggcagccatggcgaagacctaccccgttgtcagcgccgagtaccaggaggccgtcgagaaggccaggcaaaagctccgcgccctcatcgccgagaagaactgctccccgctcatgctccgcctcgcgtggcactccgctgggaccttcgacgtgtcgtccaagacaggcggcccgttcgggacgatgaagaagccggcgtagcaggcgcacgccgccaacgcgggcctggacatcgccgtgcggatgctcgagcccatcaaggaggagatccccaccatctcctacgctgatctctaccagct

SEQ ID NO: 7592 - DNA, 369 bp, Triticum aestivum
  Clone ID: uC-tsrow189022e12b1
tttttcacgcgtccgcccacgcgtccggtaggaggaaagaagagactgatgtagctcgaagtaggatagaaacatatgtaaggtcttcactccgtacagcttttgctcaaagaatggaagaagcagattcaaagcgatcatcaaggaaccctaccccagttatgtctatccttgcaaaggacattggtgacctagcaattaaggagaaaaatctgtacagtccaatattgaagacatggcatcccctcgcttcaggtgttgctgttgcaacgcttcattcatgttatggaagtgagctgaagcagttcatagctgggctttcagagttaaccccgggacagttcaagtgctcaagtctgcagacaaatt

SEQ ID NO: 7593 - DNA, 404 bp, Triticum aestivum
  Clone ID: uC-tsrow189022f01b1
ggttcattgtctgaacacgcttttttcaaagcttcaaataaatcagtctattatattctgcaactctgttaatagagtcgagctactggcaaagaaaatcactgagcttggctattcgtgcttctacattcatgctaaaatgttgcaagaccaccgaaaccgggtgtttcatgattttcggaatggtgcttgcagaaaccttgtttgcacagatctttttactagaggaattgacattcaagctgttaatgttgtcatcaattttgacttccccaagactgctgaaacatatttgcatagggttgggtcgttctggaagatttggacaccttggtttggcggtgaacttaatcacttatgaggaccgtttcaacatgtataggattgagcaagaacttgggaca

SEQ ID NO: 7594 - DNA, 389 bp, Triticum aestivum
  Clone ID: uC-tsrow189022f02b1
tcttctcggagcgcctcatcggcgatgccgccaagaaccaggtcgccatgaaccccatcaacaccgtcttcgatgcgaagcgtcttattggcagaaggtttgctgatgcccctgtccagagtgatattaagatgtggccgtacaaggttattcctggccccgcagacaagcctatgattgtagtgcagtacaagggtgaggacaagcagttctcagctgaagaaatttcttccatggtcctcatcaagatgcgtgagatcgctgaggcttacctaggagtaactattaagaatgctgttgtcaccgtgcctgcttacttcaatgattcccagaggcatgcaaccaaggatgccggtgttattgctggtcttaatgtgatgcgtatcatc

SEQ ID NO: 7595 - DNA, 292 bp, Triticum aestivum
  Clone ID: uC-tsrow189022f03b1
tcttcgcgtacgacagcctagagctgagcattgcatttggtgttagactagcgcttgcccaccctgccatgacgtccaaggtagccaacagctccggcagcaacaatgcggatgccaagctatcgccgtcggggctccccgtccgggaggtcccgggcggctacggcgttcccttcttgtcgccgctgcgcgaccgccttgactactactacttccagggcgcggaggagtacttccgctcccgcatcgcccggaacggcggcgccaccgtgctgcgcgtcaacatgccccc

SEQ ID NO: 7596 - DNA, 334 bp, Triticum aestivum
  Clone ID: uC-tsrow189022f04b1
ttttcgcgtccgcccacgcgtccgcccacgcgtccgcacccgtctcctcgcctcgccgtctcgccccacgccgccgacgcaaagatgccgttcaagaggttcgtcgagatcgggcgcgtggccctggtgaactacggcaaggactacggccgcctcgtcgtcatcgtcgacgtcgtcgaccagaaccgggcacttgtggatgctcctgatatggtcaggtgccagatgaacttcaagcgtctttcgctgaccgacatcaagattgacatcaagcgtatccctaagaaggcaactttgatcaaggccatggaggaagcagatgtgaaaaccaaat

SEQ ID NO: 7597 - DNA, 447 bp, Triticum aestivum
  Clone ID: uC-tsrow189022f05b1
tttttcgcgtccgcgcaagacgatcgtgtatatctttggaggagtttatatgtgatcactttttacctgagacccctgttataatcagtggctgcatcgatcattggcctgcgatgacaaaatggaaggacatccagtacctaaagaagattgctggggatcggactgttcctgttgaggttgggaagagctatgtttgcagtgagtggaagcaggagcttatcacgttctcccagttccttgagaggatgtggtcaaccgcctgtccttcaaatttgacatatctagctcagcatccattatttgagcagataaaagagcttcatgaagacataatggttcctgactactgttatgctggtggaggggaactccaatcacttaatgcttggtttggtccacacggacagtgacaccattgcaccacgacccgcatcacaacatttt

SEQ ID NO: 7598 - DNA, 371 bp, Triticum aestivum
  Clone ID: uC-tsrow189022f06b1
gtgtgattgagattgtcggcaatggcaggccaggccgtgaaggtgttcgtccccaccgacgacgagctgctccaggcgcagtcggacctgtggcgccacagcctctgctacctcacgcccatgtcgctccgctgcgccgtcgacctcggcgtccccaccgccatccaccgcctcggcggcgccgcgtccccgtccgaactggtcgccgccctgtccctccccgcgtccaagctgccgttccttgcccgccttctgcgccagctcgccacggccggcgtcttcagcgccaccgacgccggaacgtaccgcctcaacccgctctcctacctcctcgtggacggcgtccgcatcgacggcgacgccagccagac

SEQ ID NO: 7599 - DNA, 354 bp, Triticum aestivum
  Clone ID: uC-tsrow189022f07b1
tctttcagagcagcaaattcttgttactggaattaaggtcgtggatttgcttgcaccttaccaaaggggtgggaagattggtctcttcggtggtgcaggagtgggtaaaactgttcttatcatggagttgatcaacaatgttgccaaggcccacggtggtttctctgtttttgctggtgtcggagaacgtacccgtgaaggtaatgacttgtatagggaaatgattgaaagtggtgtcattaagctcgatgagaagcaggctgaaagcaagtgtgctcttgtctacgggcaaatgaacgatgccccgggtgcccgtgctcgtgttggtcttactggtttgactgttgctgaaca

SEQ ID NO: 7600 - DNA, 373 bp, Triticum aestivum
  Clone ID: uC-tsrow189022f10b1
ttttccacgcgtccgcaacagctgcgccaacagcaacagcccagctaagctcagctcgcccaccaccagacgtaccacgtacagagctagcagcaccatccatggccgcggaggagcccaagaaggtggaggtggaggcggcgccggagccggaggccgcaccgccagccgtccctgccgcggagcccgaggcccccgccaaggacgtcaccgaggagaaggccgtcatccccgcgcccgcgccggccgccgaggaggagaagccgcccgccgatgactccaaggccctcgtcgtcgtcgagaaggttgcagatgaacctgttgctgagaaacccacagatgagaaggctgcacacggcggctcaaatgacag

SEQ ID NO: 7601 - DNA, 351 bp, Triticum aestivum
  Clone ID: uC-tsrow189022f11b1
tttttcacgcgtccgcccggagccggtgcaggacttctgcgtggcggcggtcaccaacggctcggccgaccatccgtcgtacccggggttcccgtgcaagccggcgtcggcggtggtctccgacgacttcttcttcgcggggctggcgcgctcgggcgccgccgactcggccgagagcccgttcgggtccagcgtgacgtcgggcaacgtggcggccttcccggggctcaacacgctcggcgtctccatcaaccgcgtcgacctcgcccccggcggcgtcaacccgctgcacagccacccgcgcgccgccgagctgtgcacgtcgtcgccggccaatgctcgtgggctttg

SEQ ID NO: 7602 - DNA, 394 bp, Triticum aestivum
  Clone ID: uC-tsrow189022f12b1
ttcttcacgcgtccgcattcctcctaccacctcggcaccaccagcccaagcagagccatggcgcccaacggagacaacaccgtggccaacgtccacagcggcatcgacagcaccaacaagacgctgctcaagagcgacgccctctacacctacatcctcgacaccaccgtcttcccccgtgagcacgagtgcatgcgcgacctgcgcctcatcaccgacaagcacccatggggctacatgcagtcgtcgtcggacgaggcacagctgctggggatgctgatcaagatggcgggcgccaagaagacgatcgaggttggcgtgttcacgggctactcgctgctggccaccgcgctggcgctcccggaggacggcaagggtggtggccatcgacacc

SEQ ID NO: 7603 - DNA, 320 bp, Triticum aestivum
  Clone ID: uC-tsrow189022g01b1
tcgtcatgttcgacgccgacatggagtccgccatccggacctaccagcagaacttcggcctggaggtcaccggccagctggacgcggccactgtcaccaagatgatgtccccgcggtgcggcgtcgccgacatcatcaacggcacctccgccatgggcaagacggtccacggccggaacctctactcctacttcccggggtccccctcgtggccgcgctccaagaagagcctcaggtacgccatcacggcggccaccgagacgaccatcgaccgggccacgctgagcaaggtcttcgcgagcgccttcgcgcgctggtcg

SEQ ID NO: 7604 - DNA, 237 bp, Triticum aestivum
  Clone ID: uC-tsrow189022g02b1
tttctcgtccggtgacgttcctcaagtgcggcggcgtggccgtgggcacgggcatgcaccacgtgaccatggacggcgcgggcgcgatccagttcatccggacgtggacgaccctggcgcgcggcctggacgccgcgtccgtgcacccgtccccgccggtgcacgaccgcacggtgctgcgcgcgcgctctcccccgcatgccaccttcgagcacccggtctactccccgagcaacc

SEQ ID NO: 7605 - DNA, 399 bp, Triticum aestivum
  Clone ID: uC-tsrow189022g03b1
tccttaccgaccgcacagttgaagtgagatctgcgctaagggttcatcagcaaccatgaagagcaccaagctcgcggcgatcctgatcctccaggccgtcctggtcatggggatcctctcacacgtgaacgccgactatttccccaagtgctgcaacaactgcaggtccttctcgggggtcgacgtctgcgacgacgcccacccccagtgccccaagggctgctcggcctgccgcgtggtgacgccgagccctcacaagacgttccggtgcgccgacatgaagagcaccgtcgatggcacctgcggcgggccatgcaagaagcactgatccgttcaaggcttcaggctcagacgaggtgtgccgcctaaaataaagctcagatgagatgagcagtcatg

SEQ ID NO: 7606 - DNA, 462 bp, Triticum aestivum
  unsure (1)..(462): unsure at all n locations
  Clone ID: uC-tsrow189022g04b1
ttcttatcggccgagtaaaccctagctaaaccccgacctcctccgccggcgagcgagatgaacttcaagggcgccaggatgccgagcgcgccggcgggcgcgggcgcgctggtcaagctcgggctgctcggcggcgccgcgctctacctcggcaacaagaccctctacaacgtcgagggaggccaccgggccatcgtcttcaaccgcctcgaggggatcaaggacaaggtctaccccgaggggactcacatcgtcatcccgtggttcgagaggcccatcatctacgacgtccgcgcgcgacccaacctcgtcgagagcacctccgggagccgggatctccagaggtgagaattggtcttcgtgttcttacacgacccatgccagagagactaccaactatgtacaggaccctgngggagaactacaatgagagagtgttgccttcaatcattcatgaaacac

SEQ ID NO: 7607 - DNA, 344 bp, Triticum aestivum
  Clone ID: uC-tsrow189022g05b1
tttcgcgtccgcggacgcgtgggcggacgcgtgggcaagaagctcgtcgctttcatatccggcgtccccgcgcgcatccgtgcgcgcgacgacgttgtccgcatggccgagatcaacttcctctgcgtccacaagaagctccgatccaagcgcctcgcgccagtgctcatccgggaggtcacccgtcgcgtccacctggagaacatctggcaggctgcctacactgcgggcgtcgtcctcccgacccccatcaccacctgccgctactggcatcgatccctcaacccaaagaagctcatcgacgttggcttctcccgtcttggtccccgcatgaccatgagccg

SEQ ID NO: 7608 - DNA, 309 bp, Triticum aestivum
  Clone ID: uC-tsrow189022g06b1
ttctcctccaaacgcgcacgcacgcgtccacgaataaaggccgagggcggcgaagccaggcccaatcgccaaaaaccctagcgccgatccgatccgatcgagctctgcttcccctcccatggcggccccctcgagccaggcgagcctcctgctccagaagcagctccgagatctagcgaagaaccccgtggacgggttctcggcggggctggtggacgacggcaacgtgtttgagtggcaggtcaccatcatcggcccgcccgagacattatatgatggagggctacttcaatgcagtaatgacctttc

SEQ ID NO: 7609 - DNA, 350 bp, Triticum aestivum
  Clone ID: uC-tsrow189022g07b1
tgcatccgtcgccggccaagaagccgtcgccctccatccccgccacgcacccgcaccggtgccccaactccccgctaggcgtttttacgtcggtgcacgacgcgttcgccgcgcaacgctcgcccccgccggcgccgcacgtcccgttgagccaccagccgagctcggccacgccgaactccagcgtagccgtcccctccgccgtgagcacgaacaccgtggaggtcagcacgtcgtcgcacttttgcttctcgaccttctcccaccgcagaaactggccatgcaccgccgcggtggagtttggcggagcggaagcgacgcacgccacagcggcgggcgaggtgtcgctg

SEQ ID NO: 7610 - DNA, 350 bp, Triticum aestivum
  Clone ID: uC-tsrow189022g08b1
ttcctggcggatggcttgtctggcgttgatggcatcctcatcgatcttggcatgtcatccatgcaggttaacaggtcagataggggatttagtgtgctcaatgatggtccacttgacatgcgcatggaccctaaggcaactttaacagcagaagatatcttgaactcttggcctgagcttgaagttgggcgtatcctccgtgattatggggaggaaaacaattggcaatcccttcagaggcgaattgttaaagaacggaaaaagggggtttacactctactagcgagcttgtcaaacttatccaaagaacgtgcaccatttcaagaggacggcaaggctggattaaaact

SEQ ID NO: 7611 - DNA, 329 bp, Triticum aestivum
  Clone ID: uC-tsrow189022g10b1
gtgacatcaaaggaggtcaagatttgtggtgcccttggtccttgcatctcccttcacagacaaaacagctcggttagtcataaagaaattggtgagggtgggacaaattattggagaatgagtacattgaacagcaaaacctgtattgctttcttcttccgagctgattgtagccgtgataccgatcccccaactgtcttctttattcagttcatgacaagataccgacatggtgatggtagcaatcgcctaagggtaacgactgttgcgagaagatgggctggacctcgatctccagaaattgctgcagggtttgatcaggaagctgc

SEQ ID NO: 7612 - DNA, 465 bp, Triticum aestivum
  Clone ID: uC-tsrow189022g11b1
tctcggacgcgtgggtccacttgctgctgccgcctccatccttctaccgacggcaccggcagcgccccactccggctcgtccccggccccggccctggaagagccccactccgactcgtcgcctgcagcgacccggcctttgtcctgggcctccctcgccgacgaggacaacgaggatgacgaagaagagttggctccgctgacgccgccggcttccaaaagcccggtctctgctgctgacccgactattccatgcgttgggcacgaggaggagacgagtggtggatggcatgaggtactgcctcggcgcggtcggcgctgctaggcgtcaccaacaccggcatttgctcctcgtcccatctctgtctggctccacggtcgatgttgtcgatgcctcgcccctggacatcgtgcggcagtttgcggagatcccttatgatgctcccgttgcttggagaacggaca

SEQ ID NO: 7613 - DNA, 361 bp, Triticum aestivum
  Clone ID: uC-tsrow189022g12b1
tcgttcacgcgtccgcccacgcgtccggacacttctcccgtcccgtcccgtccccagccaacctcccatctccgtctcgcgtcgcggcggcagttccactccctcgccatgggcaagattaagatcggaatcaacggtttcggaaggatcgggaggctcgtcgccagggtagccctccagagcgacgatgtcgagctcgtcgccgtcaacgaccccttcatcaccaccgagtacatgacctacatgttcaagtacgacaccgttcacggccactggaagcacagtgacatcaagctcaaggacgacaagactctgctctttggcgagaagccagttaccgtcttcggcgtcaggaaccctg

SEQ ID NO: 7614 - DNA, 250 bp, Triticum aestivum
  Clone ID: uC-tsrow189022h01b1
tgtgttttcatttctgatgactttgatggcgagctgttccccaggtacttgagctttgtcaaaggtgttgttgactcgaatgatctccctctgaatgtttctcgtgagattcttcaagaaagtcgtattgtcaggatcatgcgcaagagacttgttaggaagacttttgatatgattcaggatattgctgacaaggataacaaggaggactacaagaaattttgggagagctttggcaaatttatgaaac

SEQ ID NO: 7615 - DNA, 324 bp, Triticum aestivum
  Clone ID: uC-tsrow189022h02b1
tgtattgcgtcttcgtactcgcctctctccgcgcaaccgagccttccgcccacctcctccccatttcgccagcggcgcacccaccaaccacccccacccgccgccatgagggagtgcatctcgatccacatcggccaggccggcatccaggtcgggaacgcgtgctgggagctgtactgcctcgagcatggcattcagcctgatggccagacgcccggtgacaagaccgttgggggaggtgatgatgctttcaacaccttcttcagcgagactggggctgggaagcacgtcccccgtgctgtcttcgtagatctcgagcccact

SEQ ID NO: 7616 - DNA, 319 bp, Triticum aestivum
  Clone ID: uC-tsrow189022h03b1
gtctgttgaaattaaaaggggaaaaataaacccgaaccactcgccgaacaccaacccccaccccccacccttaacccccgccgtccctgaccggcgccatggccgccgtcggagagcggcgcctgctcgtggtcctgctcctgctggccctgatggtctgggcgcactgcctggacggcggcgcgggccaccacggcccgcgcgtgaagcggcgccgcatgaagcgcgagatccactcccccgtcaagacggtggtggtggtggtcatggagaaccgcagcttcgaccacgtcctcggctggctccgcgccggccgccc

SEQ ID NO: 7617 - DNA, 385 bp, Triticum aestivum
  Clone ID: uC-tsrow189022h04b1
ttttatatcgtaactgtgttcctccctccgcccgcctacccaccgcagatcacacacaattcactccagcccccctaccaccgcactcgaaaacctctctctctctctctcactccaacagtttgcaggaaagagagggagagatcgatcttgcgttgccaagatgttcatcgagagcttccgcgtggagagcccgaacgtgcggtacggcgcgggggagatcgagtcggagtaccgctacgacaccacggatctggtgcacgagagccacgacggcgcctccaagtggggtcgtccgccccaagtccgtcaactaccacttcaagaccaacaccaccgtccccaactcggggtgatgccgtggggtggggcggcaacaatggct

SEQ ID NO: 7618 - DNA, 296 bp, Triticum aestivum
  Clone ID: uC-tsrow189022h05b1
tttcgcgtccgcccacgcgtccgaccaaaccgaaagcaaagaaaccccgtagtagaatcttacgagccaagcaagcgaccgagctaatggccatggcaccgtcagcatccgccgtctccttctccccccgcccatctacgggaacgactttcgggccccgcgccgcttccgcctctagctccgtgggcgccgggcgggtccgcgcggcgggagcccccgagggaggcaagtggttgggcgccgctgctcggctggtccgggcgggcggactacatcgaggccgcggcaccggcgcc

SEQ ID NO: 7619 - DNA, 411 bp, Triticum aestivum
  unsure (1)..(411): unsure at all n locations
  Clone ID: uC-tsrow189022h06b1
ttatgactcacagttctataggaatgatactcaagagtactcagctgatggtgatccattacctggtattgagggatttcaaattgtcggcgatcctaggccaggatctactttaagagcatgtggtttccctacaaatggtactacactttgtaatttccagtgggttcgctgtcatgaagatggcaccaggtattctattgaaggtgctacgatgtatgactatgtggttactgcagatgatgttggcactcttcttgctgtagactgcactcctatggatgatagtggccgccagggtgatttgtgagnggagtttgctaacaatgagaacaagataacttgtgatcaagaaatgcagaatgacatcaatatatgcatttaagggggagagccgctttgatgtttatg

SEQ ID NO: 7620 - DNA, 368 bp, Triticum aestivum
  unsure (1)..(368): unsure at all n locations
  Clone ID: uC-tsrow189022h09b1
tccacgcgtccgctttctcctctttccctcccaagcaaatcctctgcgctcccctcgcatcctcctccttcctctgccgcttgccgtgtttggttcgggaccgaaatggcattccacgacgaggcgccgctgctgctcaggatcaacaccgccagaggcggccacatgggcggaggcgagtgcgacgaggccgagaaccagcggtggccgccgtggctcaagccgctgctggcgaccagcttcttcgggcaatgcaagatgcacgcggacgcccacaagttcgagtgcaacatgtactgcctcgactgcgtcaacggcgcgctctgtncccagtgcctcgcctaccaccatggccaccacgccatcca

SEQ ID NO: 7621 - DNA, 421 bp, Triticum aestivum
  Clone ID: uC-tsrow189022h10b1
ttttatgacttcttcaaggcagccgctctcgacaagcctagggtgaccaacaaggttggatccaacgtcaccttgatcaacgtcatgcagattgctggactcaacacactcggcatctcaattgcgcgcatcgactatgctcccttgggtcagaacccaccacatacgcaccctcgcgccactgagatcctcacggtactcgaggggacactgtacgttggctttgtcacatccaaccagcccgccccaaacagaaacaagttcctctccaaggtgctcaacaaaggtgatgtgtttgtcttccccgtggggctcatccacttccaattcaaccccaacccacacaagcccgccgttgcaattgccgcacttagcagccagaaccctggggctatcacaattgccacgcggtgtttgggtc

SEQ ID NO: 7622 - DNA, 363 bp, Triticum aestivum
  Clone ID: uC-tsrow189022h11b1
tttttcacgcgtccggccgccgactgccggctgcagcactccggcgggccgttcggcgagaacatcttctgggggtccgggcagtcgtggacggccgcgaacgccgtgaagtcgtgggtggacgagaagcggaactaccacctcaacagcaacacctgcgatgccggcaaggtgtgcgggcactacacgcaggtggtgtggcgcaagtcgacccgcatcggctgcgcgcgcgtggtctgcgccgggaaccggggcgtcttcatcacctgcaactacaaccctccgggcaacttcaacggcgagcgcccgttcctcacccttgacgccgagtcctagtagtacatcgtgcgtgtgtgttttttt

SEQ ID NO: 7623 - DNA, 426 bp, Triticum aestivum
  unsure (1)..(426): unsure at all n locations
  Clone ID: uC-tsrow189022h12b1
tctctcgaaccttccgaagtccaaaccctagcgagctcccttccgcctcccccaagacacaaacctcagatcccacccatcccacgccatggacgacgacttcgacatccccgcgggcgacgacctgatgatgggggacgggatgggtgacttcggcggcgccgaagggccggggatgaaggtgggcgaggagaaggagatcgggaagcaggggcttaagaagaagctgctcaaggagggcgaagggtgggacacccccgaggtcggcgacgagggtcgaagtccattacactggcaccctccttgatggtaaaaaatttgactccagccgtgaccgtgatgacactntcaagttcaagctgggacaaggtcaagtaataagggatgggatcaaggcatcagaccatgaagaaggggaaaatgctc

SEQ ID NO: 7624 - DNA, 368 bp, Triticum aestivum
  Clone ID: uC-tsrow189024a01b1
tttatgcgtccgggcttccagaaatccagatccaaatagcgacgacctccggctccgatcttgagagaggaggcagctggacaccctcaacacagaggaggtgatccagcttgtcgacggaattggcgtcggcgacgctaaccagtactgccggtgatgtcgttgacgcccattgatacagcccatgtcgatgccgatcacgagggtgggcgagtatgacgatgaagacaggaagcttaagcgcggtgctcggcccccaggatgccgatgtcatcctagtggccagggtgggcaactgcccgctccggccctcctcgtcctggtgccatggcaacgacgggagaggaggcctgctctgctccgtgtgc

SEQ ID NO: 7625 - DNA, 439 bp, Triticum aestivum
  Clone ID: uC-tsrow189024a02b1
ctcgtctatgggtgttcttgcgaaggatgatatgcatctaatcgctacaaatggtggaaaggaaaagctagactttgtatttgggtgtgcatatgatcagcaaggccagcttttgtcctcaccagcaaagaccgatgggattcttggtcttagcagtgcagcaataagccttcctagtcagctggccagcaaaggaattatttccaacattttcggtcattgtatcactagagaaacaaatggtggggggtacatgtttctgggtgatgattatgtaccaagatggggaatgacatgggctcctattcgaggtggtccagataacttataccacacagaggcccagaaagtaaattatggagatcaggagctcagtatgcacgggcacgcaggaaattctgttcaagtgatttttgatagtgggagctcgtatacatac

SEQ ID NO: 7626 - DNA, 427 bp, Triticum aestivum
  Clone ID: uC-tsrow189024a03b1
ctccaggcggcggccgaaggcaacctccagctcttcaagaggaccgccagcgcgctggacggcgggaagggccgcctcagggacgcggtggaggctgtgacgctccaagggcgaggctccggggcgctgcacttcgccgcgcgccgtgggaggatggcggtgtgtgtgtacctggtccaggagctcggcgtcgacgtcgacgccaccgacgagacaggctatacacctctggttcatgcaattattgctggcactgtggacactttccagtatcttcttgatcacggtgctaatccagataaacccgatggacaagggtctacgcctctccatttggctgctgcaggaggaaattgtgaaatagtaaaagccttgctttccaaaggggtcaatgttgattcattgtgtcatactggaacaccactgc

SEQ ID NO: 7627 - DNA, 455 bp, Triticum aestivum
  Clone ID: uC-tsrow189024a04b1
ttctatgaccggaaggagcggtgccgccgagccgggaagagccaccaccccatcttcctcgcctccgcttccgaagggtcagagatggcggaccgtgctaaccacccgtctgtcatgcagaagtttggtggacagttccaccttgcctccagcttctctgagggtgttcgtgctcgcaacatctgcccttctgtgccatcctatgagaggcgcttcaccacaagctgctacatgactcagaaccttggcatcagtgtccccatgatgtcatcttctccattgtttgccaatgcaccacctgagaagaaaggtgtcaagaactttgcaattgacttcctcatgggaggagtgtccgctgcagtttccaagactgctgcagctcctattgagcgtgttaagctgcttatccagaaccaggatgagatgatcaaggctggcaggctctctgagccata

SEQ ID NO: 7628 - DNA, 345 bp, Triticum aestivum
  Clone ID: uC-tsrow189024a06b1
ctttcgcgtccgcccacgcgtccggtttccccggctcctctctctttctcctccggcggcgccgctgcttggagtggggatgagaggggagcttgggctgctcatgtctatagtagtagtaggtgtaggtttgccgttttagtggtgtttggccttgtgccgtggattggcgtcatgccgtcggggagttggtcaccggagcttgcaagcagcttctggtggtcgccgttggagccttctgctctgcctccatggtggaggcctaaggaaggagccggatctggcgaatccccccataataagcttgttgggccactggatcaaacctgtgtggttattctctcg

SEQ ID NO: 7629 - DNA, 371 bp, Triticum aestivum
  Clone ID: uC-tsrow189024a07b1
ttttctcctcctccttcctcgcgcgcgctcctctgctctgttctcctctccttgtgcgctagtgttcaccaagatcaggcaaacggccacgcgcgagctcgccatggagcgtaccggcggcaagggcgacgacgactcgcggctgatgcgcgacctctgcacgctgctcgtcaccatcatcgcccccgtcgcggcggcgtcctcgacgaactcgccccggaggcccgtggcgcggcgcccgcggggcggcatgtcgccggcgggcgcggcgtcgatgcttctgggcgcgtcgatggcgctgatgctgtgcgggtccgtgacgttcgccatcggcttcctcctcatgccgtgggtcgccggcgtcgcgctgc

SEQ ID NO: 7630 - DNA, 431 bp, Triticum aestivum
  Clone ID: uC-tsrow189024a08b1
tctctcccctgcctcccccagagctcgttagggttttctcttttttcgggggagaaatctcaagaggcggcaccatgctcgtgtaccaggacaagctttccggcgacgagcttctgtcggattcgttcccttacagggagctggagaacggcgtgctctgggaagtcgatggccattgggtcgttcaaggagcagttgatgtggacattggagccaatccctctgctgagggtggtggtgatgatgagggtgttgatgaccaggccgtgaaggtggttgacattgttgacaccttccgtcttcaggagcaacctgcttttgacaagaagcagtttatctctcacatgaagcgctacatcaagaacctctctgccaagcttgaaggggatgacctagatgctttcaagaagaatgttgagtccgccacaaag

SEQ ID NO: 7631 - DNA, 484 bp, Triticum aestivum
  Clone ID: uC-tsrow189024a09b1
tgtcgccgccgcagccgtgattcgaaaaaagcagcttattatggggaggaaaggctaagcgagctgccaagtgatgttgtggtcaaagtccttgagacggtgaaaacacggttgaagaaagcagctggtaatggggaggacaggctaagcgagttgcccaatgacgtgctgctcaacatcctcgagagggtgggtacgcttgatgccgtaaaaacctgcatcctgtcaaagcaaatgcagaagctgcccgctatgctctcacagatcgtaattgatctcagctctcaagatttgattcaaatggatggtgttgtggctgatgtgacgaacaagatccttagtatgaggtctccagagatcaccattcgcaagctgaagctcaaatttttcttggttccctctcgctgtctttccatcggcaaatctgttggcctcgccatggtgacccagaaattggatgcagctgagtttgagatcatgacac

SEQ ID NO: 7632 - DNA, 475 bp, Triticum aestivum
  Clone ID: uC-tsrow189024a10b1
tctgtgatgctggtcgctgctgctcaggtggcggtggctgccccggtgacggcgccggccttcctctgggctcccaagaactacggacttagtcccaatgaggctaaagaagtagtccactatcagacaatctccccaaagagtttagctgattctgttctcgaggaaggtggctggtcgaacttggtgtgttcaaaggatggtcctcaaaagaatgttgatgttgcagttctttttcttggatcaaagctacaatcatcagacatctctaaagataaacaagtcgatcctgctttagcggacatactaaagctgtccttctcaagctctgagttttccatggcattcccttatgttgccatgtcagacgacgaagcactagagaactcattgctatctggatttactgagaattgtgaggatggttctggaggaaatcatatcacttacacagacacgtgtactgcaagcagtg

SEQ ID NO: 7633 - DNA, 422 bp, Triticum aestivum
  Clone ID: uC-tsrow189024a11b1
tcttcacgcgtccgtccacgcgtccgtaccccttctagcttcttcaggtgctgttcccctccagagaaagaagaaagtatccttccaagccaccacttgctttgattcttggggagcatccattccatagcatcctcatagccgcctgcaagcagatctgagcagctataataactccctgatcggatccgctctcgttccttgcgctgatttgcgatgaccggaggggattccatggatgcaatcagcctgtatgactgggagctcctgcctgacctcgggagctccttcttcctggaggagtgctctgctggtggtggtggtaaggatcaggatcagctcttgtttgggtccggtttggtcgtgatcgacatgggtcacttcaccctccaccctgcatctcacccctctacctatgattg

SEQ ID NO: 7634 - DNA, 407 bp, Triticum aestivum
  Clone ID: uC-tsrow189024a12b1
ttttgaccgtttgtctgtgtccagtaggtgagctgctgacgggcggatcgtgccgagcaccggcgagatggcgttggccggcggagatgctcgcggcgagctcgtctgcgtcaccggcggcagcggcttcgtcggctcctggctcgtccgccttctcctcgaccgcggctacaccgtccacgccaccgtccagaacctccaggacgagggcgagaccaagcacctgcaggctctggatggcgcggacacgcggctccggctgttccagatggacctcctcgaccccgcctccgtccggccggcggtcgagggcgtccacggcgtcttccacctggcctcccccgtgatactgcagcccgcacaagaccctgagaacgagctgctgctgccggcggtcaatggcgcgc

SEQ ID NO: 7635 - DNA, 377 bp, Triticum aestivum
  Clone ID: uC-tsrow189024b01b1
tctttacgcgtccgcccacgcgtccggcggccctgtacgagtgcatgcggctgttcccgccggtgcagttcgactccaagttcgcggccggcgaggacacgctcccggacggcacgcccgtggccaagggcacccgggtgacctaccacgcgtacgccatgggacggatggagtccgtgtgggggcccgactgcgccgagttccggccggagaggtggctccgagacaaccagttcgtgccggagagcccgtaccggtacccggtgttccagggcggcgtgcgcgtctgcattggcaaggagctggccatcatggagatgaaggcggccattcgggccgtggtccagggcttcgacatcgagacggtcgggcggagc

SEQ ID NO: 7636 - DNA, 351 bp, Triticum aestivum
  Clone ID: uC-tsrow189024b02b1
ttattgggttcgtgtgcaagaacatgaagatggtgacggcaaacgacttcttcttgcccgggcttaacaagccgggcatgttgaacgctcagggctcggcggtgacaccggtgacggtgaagcagctagtggggctgaacacactgggcatctcaatggcgcgcatcgacttcggtcccaacggcgggcagaacccgccgcacacacacccccgcggcaccgagatcctcaccgtgatcatggggcagctgctggtggggttcgtcacctccaaccagcaggacgggaagaacctgctcttcacgaagcagctagtggagggcgacgtgttcgtgttcccacaggggctca

SEQ ID NO: 7637 - DNA, 452 bp, Triticum aestivum
  Clone ID: uC-tsrow189024b03b1
tttgtcagaagcatagagggcggagctacccatacctgactaatattagatcatggggaacatacaccaggccggcgtcaagaaagatgaccatggcggcggtgacaaccagcagctacaggtggtctccgttctcgagctccaggccggcgttgtggaagaccagctgcagcctctcggcggatggcatgccgtcgaggcaacctccatgttggaaaattgcaagacaaacagtactgctacagatggaggcaccagcagcaggatagatatccccggtcctgcaaccgaacagaacatccctaaacccagtaatcctcttcatccatgcccgccgccacagtcgctgccggagggtgtgcagtccgtgctcaacacgtcacgggttaaccgaaagtgcattggagatggtgatggcttcactgcttatgaggagaggattggaggtgata

SEQ ID NO: 7638 - DNA, 403 bp, Triticum aestivum
  Clone ID: uC-tsrow189024b04b1
ttttgtccggaccaacccaatcccaatccaacatcgcgagtcggggtctctgtccctcaccgtcgccgccgcggcttccccccgctgacctccgccggagttcgccggactcgtagggtttcttcagtcgtcctcttccctgctggagatccgtaccctaggtaagcctcggtttcgtcgacttcaccttcacctaatttgcgccgtgttagcagaaatcggcccgtcttccccgagatttcgtgcctttagctgtacgcgtatgttgcccgagtagatgcgaacccgcttgctgttgcccgatgtggtcgccgcccctagggtttctttcattgaagcttgggctttgtccgataggacttaggagcatggcccggtggaactgttgaggcgctcatatgtt

SEQ ID NO: 7639 - DNA, 453 bp, Triticum aestivum
  Clone ID: uC-tsrow189024b05b1
ttctaccccgccgcctcccgattcttctcctgggccgcatcccacgacgccgccgtcctcaactccaagtgcttcaactccatgctccagctcgcagccgccaacagcgacgccgcccatttctggtcactcgtctcctcgatgcgttccaagggctacggcatctcgaagaccaccctccaggccgccacggagagcttccggtccaatggcatgtccaaggacgccgacatgatccagaaagccttctccgcgcacgccaggaacgcagcggtggcggaggcgtgcaagattctccgctcagatgcggatgagatatctaagctggacaagttgaatgagttgggcgttgaggtgaccgatgagatggtggcactggttgtggagaaggtcggacagtttccgcgacaggcaatggtgttcttttattgggtggagcagtcagctggggca

SEQ ID NO: 7640 - DNA, 418 bp, Triticum aestivum
  Clone ID: uC-tsrow189024b06b1
ttactacctcacttactcgaccggccaaagcaagcaggtcaccatgggcggcgggcacgacatgcacggcggccacagcggcggagtgaagggcttcgtgtccagcctcgtcggcggcggcaaaagccacgggtacggcggccaggggcacggttgcgaccagggctacggcggccacgggcagcagcagcacgggtacggcggccacgtgcagcagcacgggtacggcagccatgggcagcagcaggggtacggcggccacggccagcacgggtaccctccgcccgccgccggtgcttgccccccgtacggcggctacccggcgcaaggctacgcgccggcggcgtaccccgcgcagcccgcgccacaccacggtgggcacatgggatcgtaccacaccgggcacggcggcgggcac

SEQ ID NO: 7641 - DNA, 445 bp, Triticum aestivum
  Clone ID: uC-tsrow189024b07b1
tttttaagatcgatcgatcgatctcggagcctggttgaatccacccaccgccactcgatccaatcacatacagcgaggaaagattaaaccgccgccgccgccgcgatgaagttgcagacggaggccgccgccgccgccgggggggaggggaggctgatgatccggcaggtgtgggcgaacaacgtggagtcggagttccaggcgatccggcaggtggcggagcggttcccgtacgtgtccatggacacggagttcccgggcgtgatccactgcccaagcaagcaccacgcgacgctgaccccgtcggagcggtacgcggcgctcatggcgaacgtggacgcgctccacctgatccaggtgggcctggcgttcgcggcgtcgcccgacgcggcaccggcggtggcgttcgagatcaacctgcgggagttcgacccgcgcgtgcacc

SEQ ID NO: 7642 - DNA, 346 bp, Triticum aestivum
  Clone ID: uC-tsrow189024b08b1
tttttgagaatcgcgcccgcccgcctagggtttccgcctgccgccgccggagaggaggggaggggaggggaggggaggatcagaaccagggcgagatggccggtcggctcctcggccaactcctcgtcatgggcggcgccgtcgtcggcagggccgtggtccaggcctaccgtcaggccatcgtcaatgcacaaagaaccggagctgctcaggaagctgtgaatggtattcgaagggctagcaaggtcatgacggagcaagaagcccggcaaatattaggaatcggtgaaaagacgagctgggaagagatcgtgcagaaatatgataccatgtttgagaagaatgc

SEQ ID NO: 7643 - DNA, 102 bp, Triticum aestivum
  Clone ID: uC-tsrow189024b09b1
ttcttcacgcgtccggcctgtgctcgtatgctagattaaaagatgcatccacgcgtgtgcacctatgaaccatgtggaactgcgaaagggtgaatggctcat

SEQ ID NO: 7644 - DNA, 432 bp, Triticum aestivum
  Clone ID: uC-tsrow189024b10b1
ttcttcacgcgtccgcccacgcgtccgcccacgcgtccgcgccggcgtgtaccacgaggtgtacatcaactcccaggcctccttcggggagctcaagaagctcatgtccgagaagacggggctgcacccggacgaccagaaggtggtgtacaaggacagggagcgggactccaaggccttcctcgacatggtcggcgtcaaggaccgctccaagatgacgctgctcgaggaccccaccgcccaggccaagcgcctcatcgaggagcgccggaataccaaggcccagcgcgccgccaaggccgtctcgcgcgtcagcctcgacctcgacaagctcgcgtccaaggtgtcggcgctggagacgatcgttagcaagggcggcaaggtggtggaggccgacctggtcacgctcaccgaggcgctgatgagcgagct

SEQ ID NO: 7645 - DNA, 395 bp, Triticum aestivum
  Clone ID: uC-tsrow189024b11b1
tttttgacgcgtgggttttttttttttttttttgtaaacaaatgcaggctaccaaacaaagtctcaattcagaatgtctcagcgcatacatcggtgccgaacaacagcaaatgcatggactaagcatatgtctgcactcagcatgtatgagaggagaacaactgggcggccaggtccatacatgctaccaaagtaccaaacacacccaaaatatctgctgtgcctacacccttattttatgatttattttctaaaagttctaatcgataattgagatgcatatgtcccgatgcatgagatattttgtgatcacttctaagttctaacgttgtcatgcctctaggatgggcgggtcggcgaagggcccgtagagccatcccttggcgatgtggccg

SEQ ID NO: 7646 - DNA, 418 bp, Triticum aestivum
  Clone ID: uC-tsrow189024b12b1
tttttcaagacgaagaacccatctgtaaaattaatatgcgttgaaccagctgaaagtccagtgatttcaggtggcgagccagccttccacaacatcctaggaatagggcctggttttgtcccagaaatattggatagatcccagatagatgaaattgtaacagtaactactcaagaagctatggacatggctagaagattggcaagggaagaaggattgcttgttggcatatcttcaggggcaaatgcagctgcctgcttaaaggttgcatcaagagaggagaacaggggaaagatgattgtgacaatgttttccagtggtgcagagaggtatctgaactcggagctctttgcgcaggttaaggaagagtgcgttaacgtcaacatgaccttctgatgtccatatcaaggcaatgaca

SEQ ID NO: 7647 - DNA, 348 bp, Triticum aestivum
  Clone ID: uC-tsrow189024c03b1
ttttgatcagcgttggtacttcagttgtaaatgataaagtaaaggaaatggatcagaaatatctagtttccgagaagactaggtcagcacttgcagctgctgaacagggcgtctctactgctggatctgccatcatgaagaacaggtatgtccttactggagcagcatgggtaactggtgccttcagtaaggttgcaaataccgcgaacgatgtcggggcaaaggcgaaggagaaaatagcggctgagcaggagggcaagaccgtagcggccgggtatgcacaagctgacatgtcggacgctcgtgaaaagcccagggatttggatggtgaagtcacaaagatacatg

SEQ ID NO: 7648 - DNA, 398 bp, Triticum aestivum
  Clone ID: uC-tsrow189024c04b1
tttaagtctttccaaccatcattggagacaatgtcacagtaggacatagtgctgtattacaaggatgcactgttgaggatgaagcttttgttggtatgggagcaaccctgttagatggtgttgttgtggaaaagcatgggatggttgctgctggagcccttgtaagacagaacacaaggatcccttgtggagaggtatggggcggaaaccctgcgaaatttctgaggaagctcacagatgaggagattgcttttattgcggaatcggctgccaactactccaacttagccaaggcacatgctgttgagaatgccaaacccttggagaagattgattttgagaaagtgttgcgcaagaaagttgcttaccaggacgaggaacacgattccatgcttagt

SEQ ID NO: 7649 - DNA, 468 bp, Triticum aestivum
  Clone ID: uC-tsrow189024c05b1
tgccgaggaacgcctccgccgcgccggagatcctgtccccgagcgtcctggacttcccgtccctcaagctcagcagcccggtgacgccgctcaccggcgaccccttcttcccctcgccggcgtcgtcctcgggggatgccgccgagcgcgcggccatcgccgacaagggcttcttcttccacccttcgccgcggggcgccgagccgccgcggctcctcccgctcttccccgtgagctcgcccaggatggccgccgcgtccgcgacggcggcgccggccgagtgagtgacccaaagcctccgcctttgcgcgcgcatcctgctcagccagccatgaagtaatctacgacttctaccatcgccaccgccctcgctgtatcatcgccgtcctttggtcgcagttctagtttcatactgtagtagtagcaaggtgtttgctgtgtcgttcttcgccggcgccggcgctgctg

SEQ ID NO: 7650 - DNA, 490 bp, Triticum aestivum
  Clone ID: uC-tsrow189024c07b1
ttcttgaaggactgaagggttcaagatgagcaacagcctgaacgcatcacgcttcccgttttgtgcgctagtcatggcatctacgaaccagagaattgtgctgttgcagcaggttgaggggcccaaatcacctgaagaaatgataacaattcttcagagagttgttgaagaatgcactacgtcccttgttgctgccaggattgaagctgaagaaagactaaacaatcaacgtttgcgtgaggaacaagatgctgcttacagagctgcacttgaagctgatcaggccagggaacgccagatgagagaggaacaagaaagacttgaaagagaggccgcggaggctgagaggaagcgtatagaagacgaggaagcacaagccagggcagtccaagaagcagctgaaaaggaagccgctcttgcaaggagacggcaagagaaggcaatggctcttggcgctgagccagagaaagggcctgacattactcgagtt

SEQ ID NO: 7651 - DNA, 378 bp, Triticum aestivum
  Clone ID: uC-tsrow189024c08b1
ttcttccacgcgtccgggtgaggccgccgtgcaggtggtggtgacggacaggggcctcctcggcaacctcctcggcaagaagaaggctgaggaggacaaggagaaggaggaggagctggtcaccggcatggagaaggtctccgtggaagagcccgaggtcaagaaggaggagcacgaggatggcgagaagaaggagacccttttttccaagctgcaccgatccagctccagctccagcttgtttagtgacgaggaagaagaggaggtgatcgatgacaacggcgaggtgatcaagaggaagaagaagaaggggctcaaggaaaagctccaggggaagctgcccggccacaaggacaccgagggtgagcacgtgacggg

SEQ ID NO: 7652 - DNA, 501 bp, Triticum aestivum
  Clone ID: uC-tsrow189024c09b1
ttctagaaagaagtcggattccaatgatgtcgcgatatgtagagttgagcagctctgtccattcccctacgacctcattcagcgtgagctgaagagatatccaaatgccgagattgtttggtgccaagaagaaccgatgaacatgggggcgtatacctacatcaatcctcgcctgctgaccgcgatgagggcgctcggtcgtggcagcatagatgatatcaagtacgtcggaagggccccatctgcagccacagctacaggtttctatactgtccatgtccaggagcaaaccgagctcgtgaagaaggcgctgcagcgagaccccatcaagtctccgctctgaacatgtagattctttgcatagccatcagaacttctgatctcctaccatgcagaaaaacaacaggtctaaattacacctcttcagccatttggtgaataatcgttgcgcatgtgtggtaccgcccattagaaaaggtctgaggtccattttgagtgcat

SEQ ID NO: 7653 - DNA, 477 bp, Triticum aestivum
  Clone ID: uC-tsrow189024c10b1
ttcttaatttctcttgcttgagctgcgagctgccggagccatgtcgtcctcctccttctccaaggccagattcgagggtaaaggagtaggaggcggcggagccgggagatccatatcgctggccgcctccagggccaagctcgccgcggccaccgccagcgccaagaaagcagctgctactacagctagcgggcggggcaagggcaagggcaaggccgtcaagaaggtcttctccctcaccggccagaagttcgatatcccagaggagagggagccccttcggatcttctacgaatcgctctccaagcagatcccatccagcgacatggccgaattctggttaatggagcatgggctgttatctccggagagagccaagaaagcctatgacagaaagctcaaacggcagcagcagatcaaatcagggaccccgatcaagtcgtcaaattccaacactgtcagcaaacacaacaacaa

SEQ ID NO: 7654 - DNA, 396 bp, Triticum aestivum
  Clone ID: uC-tsrow189024c12b1
ttcttcccatccatcatcatctcatctcctctgcctaacaggctaagcagctgagctcaagcagcggcaatggagggcaaggaggaggacgtgcgtctgggcgccaaccggtactcggagcggcagccgatcggaacggcagcgcagggcgcggacgacaaggactacaaggagccgccgccggcgccgctgttcgaggcggaggagctgacgtcgtggtccttctaccgcgcggggatcgccgagttcctggccaccttcctgttcctgtacatcagcgtgctcacggtgatgggcgtggtgggcaacccctccggctccaagtgcggcaccgtgggcatccagggcatcgcctggagcttcggcggcatgatcttcgtgctcgtctactgcacc

SEQ ID NO: 7655 - DNA, 452 bp, Triticum aestivum
  Clone ID: uC-tsrow189024d01b1
tctttacgcgtccgcccacgcgtccgtggagctgaagcaaacttggccgcagctattcaggttgctcagctggcgctaaagcatcgccagaataagaggcaacagcagagaattattgttttcattggaagccctgtgacatacgacaagaaggttttggagacaatagggaagaagctgaagaagaataatgttgcccttgacgttgttgattttggtgaaactgatgatgaaaagcccgagaaactggaagcgctgatcgctgctgtgaacagcagtgatagcagccacatcgtccatgtccctccgggtgatcatgccctttctgatgttcttataagcactcctatctttactggtgaagaaggtggaagtggctttgctgcttctgcagcagctgctgcagccaccggagctactggatatgattttggcgtggacccaaatgtgga

SEQ ID NO: 7656 - DNA, 501 bp, Triticum aestivum
  Clone ID: uC-tsrow189024d05b1
gtcgtcccaatcctcgatctgttctcagaccctcctccgtccgtcgcagctccagatttccttccccatggctccgatcaagatcggtatcaacggtttcggccggatcggcaggcttgtggccagggttgcgctccagagccccgatgtcgagctcgtcgccgtcaacgaccccttcatcaccaccgactacatgacctacatgttcaagtatgacactgtccacggacagtggaagcaccatgaagttaaggtgaaggactccaagacccttctcttcggtgagaaggaggttgctgtgtttggctgcaggaaccctgaggagatcccatgggctgctgctggtgctgagtacgttgttgagtccaccggtgttttcaccgacaaggacaaggctgcagctcacattaagggtggtgccaagaaggtcatcatttctgctcccagcaaggatgctcccatgtttgtctgtggtgtcaatgagaaggaatacaagtctga

SEQ ID NO: 7657 - DNA, 466 bp, Triticum aestivum
  Clone ID: uC-tsrow189024d06b1
tttacgcgtccgcccacgcgtccgcccacgcgtccgcaaactcatgcactcatttcacggccacagcattgcatctgcagtctgttgctgcagttttagaagcaaatcttgaagctgggtctagattgtacagagattgtcgattgcggaacatctttatgatgaacaatatctgctacatggtccagaaagtgaagaactcggatctcaagagctttcttggcgacgactggatccggctgcacaaccgaatgtttcagcatcaggcgaccaactacgagagggcgtcgtggagtcaggtgctctcttacctgagtgatgatggcctatgtgccgccggaggtgccgcttctcgtaaaatcatcagggagaagttcaaaaacttcaacctgtcctttgaagatgtttatcgagttcagacggcatggtctgtccctgatgaccaactccgcgaagatgtcaggat

SEQ ID NO: 7658 - DNA, 445 bp, Triticum aestivum
  Clone ID: uC-tsrow189024d07b1
tttctcctcctccgccccatttcctcaaagcctggagccgcgcctcgactcgctcgatcccatctcccgctcacgcccggcctccgaggagatcaggccaccgtgcggtgcagagctcgccgtcctcgcgcgcgcgggatcatctagctaccttttctcggctcgtaggcgtcatggcgcagcgggacaagaaggtggaggagccgacggaggtgcacctgcacgccgcggagatcacgctctgcgccaacagctgcggcttcccgggcaacccggccaccaagaacctctgccagaactgcttcctggcgtcctccttctcgccgtcgccctccgccgcctcgccgccgtccccttcctcttcgcccgcggcgttcccgctcttcgacaagctgaggccggccgccgtcgcgtcgcccctgctgcaggcggcgcccgtctacat

SEQ ID NO: 7659 - DNA, 311 bp, Triticum aestivum
  Clone ID: uC-tsrow189024d08b1
tcgctcatgctccggcccatttcctgaaagcctcgagccgcgcctcgactggttggatcccatctgccggtcacgcccggcctgcgaggagatcaggccaccgtgcggtgcatagctcgccgtccttgctcgcgcgggatcatctagctaccttttatcggctcgtaggcgtcatggcgcatcggcacaagaaggtggaggagccgacggaggtgcacttgcacgccggggagatcacgctatgcgcctacagctgaggcttcccgggcaacccggccaccaagaacctctgccagaactgataactggcg

SEQ ID NO: 7660 - DNA, 463 bp, Triticum aestivum
  Clone ID: uC-tsrow189024d09b1
tctgagaggaagaagcctcatagaggagaagctcaaggcgaggagaggagagggatcgtcgtcgtggcgatggatcgggtccgcggctccgcgctgctgctcggcgtcctgctcgcaggatcgctgtttgcactttgtgccgcaaaggaggaggccaagaagctcggtacggtgatcggtatcgatctcggcaccacctactcatgtgtcggtgtgtacaagaacggtcatgtcgagattatcgccaatgaccagggtaaccgtatcacgccctcatgggttgggttcaccgatggcgagaggctcatcggtgaggctgcaaagaaccaggcagctgtcaaccctgagaggaccgtctttgacgtcaagcgtctcattggaagaaagtttgaggacaaggaggtgcagagggacatgaaacttgtcccctacaagattgtcaacacggaggggaagccttaca

SEQ ID NO: 7661 - DNA, 489 bp, Triticum aestivum
  Clone ID: uC-tsrow189024d10b1
ttcggtccaaccgcagctagggttttgctccgccgcaacgcacgatccagattcctacacttccctaaccctacccaaccctgcacctcccggcggcggcggcggcggcggcgagcagcagtcagcggcaagatgaggcctattctcatgaaggggcacgagcgcccgctcacgttcctgaagtacaaccgggacggcgacctgctgttctcatgcgccaaggaccacacccccaccgtctggtacgccgacaacggcgaccgcctcggcacctaccgcggccacaacggcgcggtatggtcctgcgatgtctcccgccactccgcgcgtctcatcacggggagcgccgaccagactgccaagctctgggacgtcaagacggggaaggagctcttcaccttcaggttcgacgcccccgcgcgctccgtcgacttagccatcggcgaccacctggcggtcatcaccaccgacagtttcatggggaatatg

SEQ ID NO: 7662 - DNA, 445 bp, Triticum aestivum
  Clone ID: uC-tsrow189024d11b1
tttgtcagtgggcggacggtaggggtagcgatggtgggtcggacgatgccgcgcagggcggctggttccggatgttctccgtagcggcctacaagccctacttcgacgttgacacgtccgatgtcgtggagaggatctgggagtcggtcttccccttccgcggcaacttcacagagaagactttcgacaaacccgacctgtatgggccattctggacatgcaccaccctgatttttgttgctgcttccattgccacgtttgtcacctacctttcccacaaatggcacaagaaagagtggacctatgatattaatctggttacatggtctgctggcttattctatggctatgtgacatttgttccccttgggttatatgtcattcttaagtacttctcagcacctgctggactcgtgcaattgtggtgcctatatgggtactcttt

SEQ ID NO: 7663 - DNA, 382 bp, Triticum aestivum
  Clone ID: uC-tsrow189024d12b1
ttcttcacgacctccggtgtgtccgcgcgtcgcgtggtggtggatgcgcgccaccacatgctgggtcgccttgcgtcgatcgtggccaaggagctgctcaacgggcagcgcgtggtggtggtccggtgcgaggagatgtgcatctccggcgggctggtccgtcagaagatgaagtacctccgcttcctccgcaagcggatgaacaccaagccctcgcacggccccatccacttccgcgccccctcgcgcattttctggcgcaccgtgcgcggcatgatcccgcacaagacgccccgcggcgaggctgcgctcgccaggctcaaggcgttcgagggcgtcccgccgccttacgatcgcaccaagcgtatggtcattcccgacg

SEQ ID NO: 7664 - DNA, 459 bp, Triticum aestivum
  Clone ID: uC-tsrow189024e02b1
atcgaatccgagagtatcgtcgtcggttaggcgtcgccaccaccaccaccagcaccagcaccatggcagcgcccccctcctccgtctccgtcagggccggcgcgtccgtctcggcgaagctgaccccttcgcgggccgccagggttgggttcggtggcagggtcagcgtcggctcgggcaggaagtgcggcggccccgtgcgggcgtcgctcttctcgcccaagcccgcggtggccatggacgcgaggccgaccaaggtgcaggagctgcacgtctacgagctcaacgagcacgaccgcgagagccccgcctacctccggctgagcgccaagcagagccagaacgcgctcggcgacctcgtccccttcaccaacaaggtcagtcagtccagcaagtgatgaatctttcttgctccttcctctgttccgttcctcttcctctgctagctttgttgagtgg

SEQ ID NO: 7665 - DNA, 468 bp, Triticum aestivum
  Clone ID: uC-tsrow189024e03b1
ttttctccagctccaggttctactgttactgcttaaaagaatttgagttggccacttctattggcatgatagtgttcaacactaggagatctcttgtgttatatatagcagggctcttgatttttaaaatttgaagtagatgtcattccgtagcattgtgcgcgatgtaagggatagctttgggagcttatctcgaagaggatttgacatcaggattctgggcaatggcagagggagatctcatggtgctgtccatgagttacatgaccccgttcctgtaatccagagcagctgttgggctaacttgccttccgaattgcttcgagatgtgattgagaggttggaggctagtgaggctacatggccctgtaggaagaatgttgttgcttgcgcagctgtctgcagaacatggagagagatgtgtaaagagattgtaaaaaatccggagttttgtggaaagatcacttt

SEQ ID NO: 7666 - DNA, 490 bp, Triticum aestivum
  Clone ID: uC-tsrow189024e04b1
ttctggagggcacaaggagaaacaaatcgaggagagtcctcatgtcaaaggttttaatttgaaggatccacgtataatggatggaaattggatacatgaacctaataaagatgtcatcagggattttttccgtctgctagccatctgccatacatgcatacctgaagtagatgaaactgataaagtttcatacgaagctgagtcccctgatgaagctgcatttgttatcgcagcaagagaattagggtttgagttttacaagaggacacagacaagtatatttattcgtgaacgcgatcctagccagaatgttgcagattatcagtatagaaaatatgagctcctaaatgtcttggaattcagtagctcacgaagacggatgtctgtaatagtgaaggaaccagagccagaggggaggatattactgtttagcaagggcgctgatagtgtgatgttcacaaggcttgcaccagatggaagaaaatttgag

SEQ ID NO: 7667 - DNA, 499 bp, Triticum aestivum
  Clone ID: uC-tsrow189024e06b1
gtaccctacccccatggcggcctcgctcctctcgcgcgccgcctcggccgccttcgccctccgcggcggcgcccggctcctccccaagggcagggtcggatgggcgcgcgcggcggaggtcggctgcggggcgtcgctgtcgccgtcgatgacgcggttcgggatcgccgcgcgcttcaacgccacctcgtcggccgtgtcggaggccgccgccgcgtcgggcgccgtccacgcggtgccgcggaccgagcctgtcgtgtccgccgagtggctccacgccaacctcagggaccccgatgtgaaggtacttgatgcctcttggtatatgcctgcagaacaaaggaatccacttcaggagtaccaggtggctcatatccctggtgccttattctttgatgtcgatggaatatctgacagagcatctaatctgccacacatgctgccatctgaaaaagcattttctgccgctgtgtcttcccttggcatctacaacaaagat

SEQ ID NO: 7668 - DNA, 425 bp, Triticum aestivum
  Clone ID: uC-tsrow189024e08b1
tctatcttgatctcgcggtggtgccgggagaatggcgtcgccatggaaggcagcgagcctggcaagcccgagccggcgccaccggtggccgcaaacaaggccgcggtggaggctgcgcgcatgaccgcgtcgtttctggtgaagaagctctcggcctcgttctcccctggttcggacaaccgcgtggtgcacgagatccgtctgctcgccaagtccggctccgagagccgcgcgttcatcggagaggccggcgccgtgccgctcctcgtgccgctgctcaactccgaggacgccgcgctgcagctcaacgccgtgacggcgctgctcaacctctccattctcgatgccaacaagaagcgcatcatgcacaccgacggcgcggtggcggccctctgcgaagtgatgggctccggcgcgacatggcg

SEQ ID NO: 7669 - DNA, 406 bp, Triticum aestivum
  Clone ID: uC-tsrow189024e09b1
tcttcgaggaggagcagccggagataggatggcgatggccatggaagtgctcgctcgacttgcctgtatcttctccaccaccatacttttgcagagcctggcatggccctgcagcaatggagagagaggcttctcctacccccagtctccaaaggtcccctccattgtcagcgagaggtacaggactgcctaccacttccagcctccaaggaactggatgaacgatccatgtggaccaatgtactacaatggcgtctaccatgaattctaccagtataaccccgatggcgcctttgaccccaatgactcccttatgaacatggtttggggccattcggtttcaacagacctcatcaactggatcggtcttgaaccggcaatcaaaccagatatcccaagtgacata

SEQ ID NO: 7670 - DNA, 427 bp, Triticum aestivum
  Clone ID: uC-tsrow189024e10b1
tgccagatccggccgggaggggcagaggaggcgccggcgtgatgtcggccgagcatggcgccgcggcggcggacggggctggggcggagcctcctcccccggcgccgatgccggggctggtggcctcggcggacgcggcggggcagaggtccctgccgacgccgttcctgaccaagacgtaccagctcgtggaggacccggcggtggacgacgtgatctcgtggggcgaggacgggtcgacgttcgtggtgtggcggccggcggagttcgcccgggacctgctccccaagtacttcaagcacaacaacttctctagcttcgtgcggcagctcaacacctacggatttaggaagatcgtgccggaccggtgggagttcgccaacgactgcttccggcgaggcgagaagcgcctgctctgcgacataca

SEQ ID NO: 7671 - DNA, 180 bp, Triticum aestivum
  Clone ID: uC-tsrow189024e11b1
tcttgacaagggaaggaggaggccggcgaggaaggcatgctacagcggggaaggagaaggtgagcgatcctagcatggggaaggggcagggtgaggcctcgcgcacctgccggcggtcggcaggtcgacttgttgcgccaccgcgtcgtcatctcctctgcaccatgagaggcgccacct

SEQ ID NO: 7672 - DNA, 440 bp, Triticum aestivum
  Clone ID: uC-tsrow189024e12b1
tatccccttctgtgatttcagcataggcccagtgcacaagaaagatgttatgaaggctagtgttatgcttgagaggaagaaggaatatgcaactatcttggcgtttgatgtcaaagtgatgcctgatgcccgtgatcttgcagaagagtctggcgtgaagatcttcgtggcagatataatataccaccttttttgaccaatttacagcatacattaagaacatatgggaagagaagaagaaggacagtgccgaagaagctgttttcccctgtgttcttaagatcatgccgaactgtgtcttcaacaagaaggatccaattgttttgggtgtcgatatccttgaagggatagccaaggtgggaacgcctctgtgcataccctcgaaagaatttatcgatattgggaagattgcctccattgaaattaatcacaagcaagtc

SEQ ID NO: 7673 - DNA, 505 bp, Triticum aestivum
  Clone ID: uC-tsrow189024f01b1
gtaaaataccgcgcaacatttgtttgttacaaaggtggcattgctaggattaagcctgggcttaaagctcgaagaagacttgttgcgaagactggctgcaaagctatgatggtggtgaagtataacgcaagtgagaatcattgggaagtagtgtttgttgagctggagcataaccacccatgtaatcctgaaatggtcagattcatgatgtgttttaaggatctccctgactggcagagggagcaccgaccattcaatgcgaaaactagattgaacccaaagattcattctggtagaggcaggccacccaaccaaaacaaagatttcatggtgaggtccttcgctcagtctaattattcaattgaagcagctgccaagtgtgggaagctgagatttgcagagggtgacgttgaggcattattagtctttttcgataagatgcaagctcaaaattccaacttcttctacaactgggacatggatgatgaaggccggcttaaaaatg

SEQ ID NO: 7674 - DNA, 469 bp, Triticum aestivum
  Clone ID: uC-tsrow189024f02b1
tttgacgcgtgggcgcgacgacgtccccgtcgccgccgccttccgccgcgcgcgcctccgcaaggaccccaacgcccacttcctcctcgccgtcaatctccaggtccccggccggccggacgcctacagctcggtcttctacttcgcggcggaggcgcccatcccgccggactccctgctcgggcgcttcgtctacggcgacgacgcctaccgcaacgcccgcttcaagatcgtcaaccgcatcgtcaagggcccctggctcgtccgcgccaccgtcggcaactacggggcgtgcctcctgggccgcgcgctcacgtgccgctaccacaggggcgacgactacctcgagatcgacgtggacatcggcagctcggcgatcgccactgccatcctgcatctggcgctgggcgcggtcacctcggtgaccatcgacatgggcttccttgtcgagtcccagtccgaggaggag

SEQ ID NO: 7675 - DNA, 388 bp, Triticum aestivum
  unsure (1)..(388): unsure at all n locations
  Clone ID: uC-tsrow189024f03b1
ttctcgcgtccgcatgtggccattgccaccctgatattgtcaaggccgtgcaggagcagaccaagttgcttcagcacaccaccaccatatacttgcatcatgccatcgtcgagtttgccgaggcgcttgcctccaagatgccaggcaatctcaaggttgtgtacttcgtcaattctgggaccgaagcgaatgaactagcaatgttgatggctcggctgtacagcgggaatctcggtatgattgcattgagaaatggataccacggtgggagtgctggaacaataggtctcacgggtttgcagacgtggaagtacccgattcctcagggtgagattcatcatgtcatgaatccngatccttaccgtggagcttttgggtctgatgctgc

SEQ ID NO: 7676 - DNA, 444 bp, Triticum aestivum
  Clone ID: uC-tsrow189024f05b1
tgctgctcacgcggttcgcgtgcggctcgctggccgtcgggttcgcggccaaccatgccgttgctgacggccacgccaccagcgacttcctggtcgcgtggggccgcgccgcgcgagggctggacatctccggcccgtcgccgacgccaccgccgcacagccaccccgatctcttcccgccgcgcgacccgccagtcgtcaacttcgagcaccgcggcgtcgagtactaccggccgtcgcccagcaaccccaagcagggcgagggcggacaccacggcgccgaaaacgtggtcatccacaaggcgcacttcaccaaggacttcatcgccgggctgcgcgccaaggcttcggaggggcgcgggaggccgttcagccggttcgagaccacgctcgcgcacctgtggcgcaccatgacgcgcgcgcgcgacctgagccccgaagaga

SEQ ID NO: 7677 - DNA, 454 bp, Triticum aestivum
  Clone ID: uC-tsrow189024f06b1
gcgacgacagcggcaagaagcacccgctggacgccatgggcgccttcttctcggcgcaggtgaaccgccgcaagctggtcaccacgcagaagctggccatgtccgagcgctgcacctcctgcggcgacgacttccccggctgcgcccaccgccccgccgaccgcaaggcgtggatggcggagctgggccccgaccgcctgcgcctgcaccaggtggtctggccgggcacccacgactcggccaccaacaagatcggcatccccttcatcacccgccccttcgcgcagtgccagtcgctctccgtctaccaccagctcgccctcggctgccgcctcctcgacgtccgcgtgcaggaggagcgccgcgtctgccacggcgtgctcgccacctactccgtcgacgtcgtgctcgacgacgtcctgcgcttcctgtccgagacggagtcggaggtcct

SEQ ID NO: 7678 - DNA, 385 bp, Triticum aestivum
  Clone ID: uC-tsrow189024f07b1
ttttcacgcgtccgcccacgcgtccgcccaattttctcatccgcgagaggacgagcggaggctggacggtggcgcgggggtctgcaatccccggggtcggtcagcagccgacacgacaccagatcgagcgccaggcagggtcgggcgccgctcctccaggcggcacggtcgcggcagaccttcagttggatctgcacctcgtacagcttgcccgccagcctcctcttccactccttccccttcgacggcgacccctcaggttctccgacgagatccgcgtgtgcactcgccgcgtgatggagacatcaacatcaggggtctctccctcccgtccgcgtcaaggccggaggggactgccagcggtggactgcaagcgagcgagcgt

SEQ ID NO: 7679 - DNA, 432 bp, Triticum aestivum
  Clone ID: uC-tsrow189024f08b1
tcgtccacgcgtccgacaccccagaaatcccacccgtctccacccagataaccacgagagatatttcgtccgccccgacgaccgacgaacggcagagaaaagtgaggtgatcatgagcaccatggcgatgtcggcgctgaacccggacgcgcccatgttcatcccggcggcgttcaagaaggtggaggactactcgcccgagtggtgggagctggtcaagaccaccgcctggttccgcgaccactggttccgccagcaccagctctacgaggacctcgccgacgacgtcgacgtggacgacgtcgccgccctcctccccgacgactccgtcgacctgctcgacgccgacgacctcttctactccccgccgtcgccccagccccagcccgacttctaccactacaaaccagcagggttcggcggcgacatgga

SEQ ID NO: 7680 - DNA, 375 bp, Triticum aestivum
  Clone ID: uC-tsrow189024f09b1
ttgtccacgcgtccgcccacgcgtccgcccacgcgtccgcggacgcgtgggtccgtttggagttagagaggacggcaagtcgaaggcgtcgatttcgagccaaattcacatgtccaaagattgtggacggttgcaatcagatgagataccaattggtagcaaagatggcagtgcagttactgttgcggcggagaacattgtttttcacgatgcagcagtttctgaaaaagtaacactgggttcatttgctggagactacgaccaagatgatgacaatgcggcagctttaggtgaataccttaagcgaccagtgcgcttggcgagttatgcgtgggctcaaggaggaggttttgcacagagcatcaccccttgggc

SEQ ID NO: 7681 - DNA, 451 bp, Triticum aestivum
  Clone ID: uC-tsrow189024f10b1
gggtaacacacagcagaccggcgtgaaggaggaggatcatggtggcagtggcaaccagctctccgttttccttgatcatgtcctggccggcgttgctgaaaaccctctcgccggagggcatgactttgaggcaacctccatgttgaaaaatcgcaggataaacaatactgatgcatacggaggaggcatcagcagcaggagcaggacagatgatagtcttcgtccatcacggcgggggcggcggccggtgccggagggcttgcagttcgtgctcaacactttaccggttgacccaagctgcattggggatggtgatggcttcactgctcatgtgaaggagatggcaggtgatacaaacaaccgagatccaaagcaataccgaataagaatgagagggattgatgcaccggagctgaacatggaatatgggaagaagtcaaagaaagggttg

SEQ ID NO: 7682 - DNA, 479 bp, Triticum aestivum
  Clone ID: uC-tsrow189024f11b1
tccacgcgtccggtggcaccggcccttccgcaatggcctccttcctcgccgcccgccgcctcctctccaccgccgccgcccggcgcctcctcccatgcacttccccgccgcctcctgccaccgctgctctctgctggctgtccactgacgcctcgcccccaccgcctcttcccgccccccctctggagcccgcggtcgaccctcccaagaaggatggagcctccttctccgccggttccggcgctggaggggcctaccggactggaaagggagctgcatcggggggtcgccgatctggtggcgcggggtacgaggaggagcagcagaaggtcctccgcgcgtcgcttctccacgtgccgaggatgggatggagcgagtcggccatgatcgcgggtgcgagggacgtgtccgtgtcgccggccatcgtcggtgccttcccaaggaaggaggctgcgctagttgagtttttcatggatgac

SEQ ID NO: 7683 - DNA, 379 bp, Triticum aestivum
  Clone ID: uC-tsrow189024f12b1
tcttccacgcgtccgggaggtctgtgacttcgacttcgagccctgcggctactccatgaacgccatcaacggatctgccttctccaccatccatgtgacccccgaggacggcttcagttacgcgagctacgaggtcatgggcatggacgcttcggccctggcctatggcgacatcgtcaagagggtcctccggtactttggcccttcagagttctcagtggcggtcaccatcttcggtggccgcggccatgccgccacctggggcaagaagctcgacgccgaggcatacgactgcaacaacgttgtggagcaggagctcccctgtggaggcgtcctcatctaccagagctttgccgcgaacgaagaggttgctgtctct

SEQ ID NO: 7684 - DNA, 391 bp, Triticum aestivum
  Clone ID: uC-tsrow189024g01b1
tcttttcttttcaagcagcatcttacagcatttgtggaaggtttatatggaatgatccgtgacaatgtcaagaaagaattatctgcattgctcttgcatgctattcaggtcccgagaattatgaaagccagtatggtaagacgttcatttggatcatcaagtttgagggggcgttcattttcaaatcaaggtagctattggctggcgatagttgacaatttgaatgaactcttgaatatcttgcgagaaaattgtgtccctgctatttttattcggaagatatttacccagattgtctcatttatcaacgctcaacttttcaatagtcttcttgtgcgccatgagtgctgctcttttagcaacggagaatatgtaaaacaaggattggcac

SEQ ID NO: 7685 - DNA, 435 bp, Triticum aestivum
  Clone ID: uC-tsrow189024g02b1
ttgcagtgactctggggccaaagctgtcggagacggtcaaggggaagctcacgctgggcgccaggatcctgcaggccggcggcgtcgagaaggtgttccggcagtggttctccgtggacaagaacgagcggctggtgagggcgtcgcagtgctacctgtccaccacggcgggtcccatcgccgggatgctcttcgtctccacggagcgcgtcgccttccgcagcgaccgctcgctggccgtggccgcccccgacggcgccaagctccgcgtgccgtacaaggtgacgataccgctgcgcaaggtgcggcgcgccgtgcccaccgagaacaagcacaagccggagcagcgctacatcgaggtggtcaccaacgacggcttcgagttctggttcatgggcttcgtcagctaccaccggtcgctgcagcacctggagc

SEQ ID NO: 7686 - DNA, 332 bp, Triticum aestivum
  Clone ID: uC-tsrow189024g03b1
ttttcataccagggaggtgaggccgctctgcaggtggaggtgacagacaggggccttctcggcaacctcctcggcaagaagaaggcggtggaggacatggagaagcaggaggagctggtcaccggcatggagaaggtcttcgtggaagagcccgaggttaagaaggaggagcacgaggatggcgagaagaaggagaccctcttctccaagctgcaccgatccagctccagctccagctcgtctagtgacgaggaagaggaggaggtgatcgatgacaacggtgaggtgatcaagaggaagaagaagaagggtctcaaggagaagctcaagga

SEQ ID NO: 7687 - DNA, 397 bp, Triticum aestivum
  Clone ID: uC-tsrow189024g04b1
tttgctcgcgagagccgccggacccggagacgccttctcctccctctctgctttgggattcaactcccaccaccaccacctctaaactcaaccggattgcagcttctcatcccatctcgtatatatacgcgccctcccaatctctttctccgagcgcgaaatctgacagagcagtgtcagaccgttgttgagcaggaagcggaaggacagttcaatccgcaatggaatccctagccgccgccacgttctcgccctcgcgcctcgctgcccaccccgccccgcccgcggctgcggcagcgggcagatcgagggcggtggcggcactagggaggaggaggagcagcagcggcctgaggtgctcgtcggcgagcgcgaccccggtgatcaatgggagcgc

SEQ ID NO: 7688 - DNA, 394 bp, Triticum aestivum
  Clone ID: uC-tsrow189024g05b1
ctcagcggcaccagcgatggcagagttatcgtggctcacggcgctagggttcgtcttcctgaccttcaactccggcatggccgtgtaccgctccaacggcgacgccgggtccgtcatcttcgtcgccgtctcctacctcgacctcgtggccctcttcgcctgcctgcgcctctacgagcgcctcgaccgccactccccccgccgggagcggatcaaggccgccgtctgggcgctcaccacgctgctcaccgtcatgttcacctacaaggtcgccgaggtcatgccgctcgccgtcaagctcctggtctgggcgatggccgccgccaccacctgcggcggcttctacgtctttttcgtccacgacgacaagccgtaccagcagctgcaggacgcg

SEQ ID NO: 7689 - DNA, 439 bp, Triticum aestivum
  Clone ID: uC-tsrow189024g06b1
catctacaagtgctgcttggggaggtcgccaactttgtcgcctatgtcttcgcaccagctgtcctcgtgactcctcttggagcactgagcataatcgtcagtgttagcgcactttgtgctgaaggagcggcttaacaagctcggcgttcttggttgtatatcgtgcatagtaggttcagttgttgtcgttctacatgcccctgaagagcacatgcccgattccgttgaagaaatctgggatctagctactcaaccaggatttctagcatatgcgggaacaacattgttactcatggcaatagtagtagtgttcatcgaacctcgatatggtcagaagaacatactgatatatctgggtatctgctcttcaatgggatcattaactgttgttagcatcaaagccgttggtgttgccataaagcttacgctggatggaatg

SEQ ID NO: 7690 - DNA, 403 bp, Triticum aestivum
  Clone ID: uC-tsrow189024g07b1
ttgttcacgcgtccgcccacgcgtccgcccacgcgtccgtccacgcgtccgcccacgcgtccgcccacgcgtccgcggacgcgtgggttcatggcaggaagctttagggctaacccatatgagacttgtactaccagccagcagtacaaacacctggcctatgtcatctcttttctcccttactattggagagctatgcagtgtttaagaaggtacatagaggaacatgacattaatcagctcgccaacgccgggaagtacgtgtcggcgatggtggcggctgccgtcaggttcaagtacaatgtcacaccgacaccattctggatgtggatggtcctcatctcatcctcaggcgccaccgtttaccagctctactgggactttgtcaaggattggggctttt

SEQ ID NO: 7691 - DNA, 374 bp, Triticum aestivum
  Clone ID: uC-tsrow189024g08b1
ttttgcaaatcgaagccatgcaccaaatttttcagcactgctggttgtccctttggttcaagttgccattttctccataacttccctggaggtcaccaggctgtttcaaagatgaccaacttgggtggtccagctgtttcagctcctcaaggaagaatgcccatgggacctggtgttcctgatgggccacctacacccagcttgaagactcgcttgtgtaacaagttcaacacagcagaaggctgtaaatgggggaacaagtgtcattttgctcatggagagagggagctcggaaagcccatgctgttgaacaactcgatggcacctccaatgggaccaagacccaacggtcactttcagccctcaccgatgcc

SEQ ID NO: 7692 - DNA, 383 bp, Triticum aestivum
  Clone ID: uC-tsrow189024g09b1
ttcttcgattcttctcagaaccttcctgcaagactttgtttcatggcttttctaccggcgcggttctaatctcctctgcgtctatagaattccagtctggatcaatattaggctttcagtgcgaaggaaaatatctccttcacaggaatgccggaagatgtgcatgcgtgctagagggctaccttggttgggaactggcagtctagcttttgaagatactgaaatacaacagttgctccatgggcatacgcaggatgatccatggaccacctaccatcttggtgaagatggttgaaacgaattgatcatctgcaggtcttgtccacatcattgagtgcccctgatcagttctgatcacctcaagttacaacatcactgccttt

SEQ ID NO: 7693 - DNA, 420 bp, Triticum aestivum
  Clone ID: uC-tsrow189024g10b1
tcggcaagctcctaagttgcaccataggttgtcatcaagcgggcgcgcgcctagctagctaacaaggtggcagcatcaagaagagcatcctcgatgcgtgtaagagctgccatgaagatggcatacctcctggccttcgccgtggtcttgctctcggcgtgcagcctcgcctcctcgaggtcgctgccctcggtcaccacccatggagccgacgcacagctggaaggtggccgagccgcgcgcgccaagctcgaccctccaaccgcgaatgccgataaaccgccggagctcggcatccgcgacgacggtgccattcagactgagaagaaaaagcgccatgccgaggcgccgcccaagcaccacgggcctggcaaacacgctcccccggccgacccttcgccgccggcgcctgatccggac

SEQ ID NO: 7694 - DNA, 222 bp, Triticum aestivum
  Clone ID: uC-tsrow189024g12b1
tcgtacagattagtttcgtcgacatccacgactccatcaggttccaccgaagaagggtctcgagcactgcatttgatcctgtcttattctgcagcaacgagtttcgaggtactggcgcggatcgcgttggtgttgccgcgcaggtcggcgcagaattcttccatggacgcggtgatcttctccaggtagtccttgatggacggatccatcgcttcaagttgg

SEQ ID NO: 7695 - DNA, 410 bp, Triticum aestivum
  Clone ID: uC-tsrow189024h01b1
ttcttccactccaaactggacatgcccagccgctcacaaacagcggcgtcagagaacgcaaccactgtaccatgcggcggcggggaccaaggaaggacggcctaggaggtttataccatcaaaccacaggattgggaaaattgtgcctttgttcacagagttgaaagatgatgcactggatagcttcagggaaacatttgcaggcagtcagaccgaaagaaacgcaagggctaattaaagaagccaatgaagttgttgcctaactggaagctgcaaaacatttcttgcaaagttgatcacaatacttaatcaaatgacattgagatccagaaatgtgagttcgaaggatgaatcacaatgtatatgttactgattattagtgatgatgcattcagaaaatgtacataaac

SEQ ID NO: 7696 - DNA, 453 bp, Triticum aestivum
  Clone ID: uC-tsrow189024h02b1
tttacgcgtgggaagaccatgagcgtcaaatattggaaaaggaaaaaatagaggagacaaagagattgactattcagaagaaatctgcagatgaagaaagggagaggcttttgaaggaacagagacttagggagcagcagaggatccgtaaagaaatagaggaaaaagaggcgagggaagcagcaaaaatgatagaagatttaacaggaagggggaagaataagaaaaaaattcacattgagggggatatgacaaaacaacacgccatggaggtggtgttgaatcaacaggtgaaggagcgtcaggagatggaaaaaaaactggcgaaacttgcaaagacaatggatcacttggagagggcaaaacggcaggaggaagcaccactaatcgaggaggccttccagaaacgcctcgaagaagaaaagatccttcatgagcaagagcagctgagag

SEQ ID NO: 7697 - DNA, 437 bp, Triticum aestivum
  Clone ID: uC-tsrow189024h03b1
tcttcgcgaaggcgcggcggcaaccccatctacgcaggccgtccgccgcactccgatttcaagcaggaatcacggaccaacccgatcctcccgcccatagatactctccctccacgcatcgcctcatctgaccacctcgctgcaaaccaagatccgcatctgccgattagggtttactacgattggtatttggtgagcagcttctaaaggggatgggtacggtcggcgcttggaggcgagcacaggatggttccgtcactaccggtgaagccgtcgaggacctggatcgatctcccatcgccgccgccggcggcggcggcggccagcacgaggctccgaacaccgtgggcacacgggccgcgcccattgacgtcgaagcgctaggcgacgagaggaggtcgagagctaagataaagcgccgtgtggttgttgtggat

SEQ ID NO: 7698 - DNA, 360 bp, Triticum aestivum
  Clone ID: uC-tsrow189024h04b1
ttctctcgtccggcccgctcacaccaaaaacaacaaccatcatcagttgctcggctccggagaggcagaggcagaggcaaagatgggctccaccgcagccgacatggccgcctccgccgacgaggaggcgtgcatgtacgctctccagctcgtctcgtcgtcgatcctcccgatgacgctcaagaacgccatcgagctgggcctcctggagaccctggtggccgccggcggcaagctgctgacgcccgccgaggtggctgccaagctcccgtccacggcgaatcctgccgcggcggacatggtggaccgcatgctccggctgctcgcctcgtacaacgtggtgtcgtgcacgatggagga

SEQ ID NO: 7699 - DNA, 452 bp, Triticum aestivum
  Clone ID: uC-tsrow189024h05b1
ttcacgcgtccgctccgcaccatgggttaactaggcgccttaatctggccaggccggctgcaaacgaggtcagagacggcagccagcagagcggcgacggcagtgagcatggtgggagcggcggaggggaagctggcgctgggagacatgagggtgctcaagccattggcccacctgctggtcgggctggtgctgtactgggtggccgaggagatgacggtgcctgtgctggtcgacgtcaccaccgccgccctctgccccggcgacggcagcacctcctgcccggaggccatctacctcaccggcctccaccaaacggttggaggcattttcagggctgtgggattcactctgatggggcagctcgccgacgagtacggccggaagcctctcctcatcctcgccgctggcacctccatcatcccttacagtgtgcttgctctgagcagcac

SEQ ID NO: 7700 - DNA, 268 bp, Triticum aestivum
  Clone ID: uC-tsrow189024h06b1
tccacgcgtccgcgagtacaacctgatgaggcgagctcgcctcgggctgccgccgacctcgccgccgccgccgctacagcaccaatagatagatttatactataaaataatgctagaatcagggctggctaatacaccacgtgcaaatagcctgtaccaataactgagcatgtatgcttacactgtgtatgtatttctaccttctgtgaattttttgtgaataccgtttgcccctaaaaaaaaaagaaaataaaaaaaaaaaagatat

SEQ ID NO: 7701 - DNA, 393 bp, Triticum aestivum
  Clone ID: uC-tsrow189024h07b1
ttctaccactccaaactggacatgcccagccgctgacaaacagcggcgtcagagaacgcaaccactgtaccatgcggcggcggagaccaaagaaggacagaagaagaggtctcacgcctgggagcgtgtacaggttcgaccctcattcaggctaatgttcctcctctcttttgcttcagctggttccgtttcgaatcaaaaggcctgcagggtgaccccgatcgccggacgtccacgagggatcgccggagttcgtggggctacgttttcatcctcgtgaacaactgcctccagtacagcgcttactacggcgtgtcgacgaacctggtgaacttcctcaaggtccagctgcactccggcagtaaggccgcggcgaacagcgtcaccaactgg

SEQ ID NO: 7702 - DNA, 347 bp, Triticum aestivum
  Clone ID: uC-tsrow189024h08b1
tcttttttggatggtattcaaggccccatctatgttggtactggatgtgtctttagaaggcaggcgctgtacggttatgatgctcccaaaacaaagaagccaccgtcaaggacttgcaactgctggccaaagtggtgtgtgtgctgtttctgctttggtaacaggaagaacaagaagaaggttaccaagccaaagacagagaagaagaagaggttgtttttcaagaaggaagaaaatcaatcacctgcgtacgcactcagtgaaattgacgaagcagctgcaggagctgaaactcagaaggctggtattgtaaaccaacagaagttagagaagaaatttggccagtc

SEQ ID NO: 7703 - DNA, 398 bp, Triticum aestivum
  Clone ID: uC-tsrow189024h09b1
tttcaaagccaaagtttatctacttatcttgtggtagtatttcagttctttaatttccagtaaattgtcttgttatcatactacaattcatcctggtcgtctcctctatcctcgtcaagatcagatttttgtccatctctcctcgtcagatccatcgggatcctgacagtcgtgtgtacaggtgccccgccatgaagtgcccttccgattcctcggctggtcgtgatccctgggctcctcctcccgcttctggcggtggcggctccagcgagccagccaagaagcggcagcggacctcgagctcgagccaggctgaggcatcctcctcgtcctcacagcctccgccgcagcagccgggggacgcgagagaggtgccggatctgggggaggacgtgatg

SEQ ID NO: 7704 - DNA, 462 bp, Triticum aestivum
  Clone ID: uC-tsrow189024h10b1
tcggtttgggctgttcgtcgcggtcgccatcggcgccaacatctccggcggccatgtgaaccctgccgtcaccttcggcctcgccctcggcggccagatcaccatcctcaccggcatcttctactgggttgcccagctcctcggcgccatcgtcggcgccttcctcgtccagttctgcaccggcgtggccacccctacacacgggctttccggcgtgggcgcctttgagggcgtcgtgatggagatcatcgtcaccttcgggctcgtctacaccgtgtacgccaccgccgccgaccccaagaagggatccctcggcaccatcgcccccatcgccatcggcttcatcgtcggcgccaacatcctcgtggccggccccttctccggcgggtccatgaaccctgcacgctccttcggccccgccgttgccagcggcgacttcaccaacatctgggtctactgggc

SEQ ID NO: 7705 - DNA, 383 bp, Triticum aestivum
  Clone ID: uC-tsrow189024h11b1
cggacgcgtgggtcccagttctgttcctcggccattctagccaccatgccgggctccatcgccttcggtcgcttcgatgactccttcagcttggcctctttcaaggcctacatcgctgagttcatctccaccctcatcttcgtcttcgccggcgtcggctctgccatcgcctacactaaggtgagcggcggcgcgccccttgacccatccgggctgattgccgtggcgatatgccacgggttcgggctgttcgtcgcggtcgccatcggcgccaacatctccggcggccacgtgaaccctgccgtcaccttcggcctcgccctcggcggccagatcaccatcctcaccggcatcttctattgggttgcccagctcctcggtgc

SEQ ID NO: 7706 - DNA, 421 bp, Triticum aestivum
  Clone ID: uC-tsrow189024h12b1
tgtaagaggccgttcttgacaacggtggacgaggagctccagatggacgaggagatgtacgggtactacggcctcgacgagcacgcgcccgagaggaagcgccggctgacggcggagcaggtgcgcgcgctggagcggagcttcgaggaggagaagcggaagctggagccggagcggaagagcgagctggcgcggcggctgggaatcgcgccgcggcaggtggccgtgtggttccagaaccgccgcgcgcgctggaaggcgaagcagctcgagcaggacttcgatgctctcagggccgcccacgacgagctgctcgccggacgcgacgcgctcctcgccgacaaccaccgactacgatcgcaggtgacatcactgaccgagaaactgcaagccaaggagtcgtcggagctagaggagcgaa

SEQ ID NO: 7707 - DNA, 388 bp, Triticum aestivum
  Clone ID: uC-tsrow189025a03b1
ttatcggcctcctccaccgctccaagttcggcaagtgcatcgggatgaaggagctggcgttcgccggcgagctgttcgacgcgctggcgaggcggcggaacatcaccggggacagcatcagcaaggcggagctgctcgagttctgggaccagatctccgacaccagcttcgacagccgcctgcagaccttcttcgacatggtcgacaaggacgctgacggcaggatcaccgaggaggaggtcaaagagatcatcacgctgagcgcggcggccaacaacctgaagaaggtctcggagcagtcgaggagtacgcccggctcatatggaggagctcgaccccaacaacctcggctacatcgagctgtacaatctggagatgctgctgctgc

SEQ ID NO: 7708 - DNA, 407 bp, Triticum aestivum
  Clone ID: uC-tsrow189025a04b1
gtggaggggtgaggagccagtcactcgcctggaatctcatcaggccctggtgtggtgtggcagtgaccttcacgtcgaaataaccggaccttttagatgatctggagatggtgaggagctgagagcacctagagatcggcagtgggggctgtggggcagcaaggacatgactgtcatgccgcctgcgcgccatcggcccgcggccaagacgcccatgtggataatcgtgctcctgtccctcgtctgcgtcgtgctgatcggggcgtacgtgtacccgccgcggcactactcgcagtgctacctctctgcttctagcgtctgcacgccgttgaaggattggctcccatccatcggccgccgggagaaaaccgacgacgagatcatctcagccgctgttatcagggata

SEQ ID NO: 7709 - DNA, 364 bp, Triticum aestivum
  Clone ID: uC-tsrow189025a05b1
tacttcatttggctgcagcacctcacctcgtctctacccctcgatctccgtcgccgtcttcccccattctcccaggaccgaccatcctcacctcccgatctaccccgccgacgccgccgagatcctcgttccatggtgtcgtgacggcggcggcgctcatggaccccaagtcccccgacgaccgcccggaggcggcggcgccacagccgctagagtggcggttcgcgcaggtcttcggcgagcgcggtgccggcgaggacgtgcaggaagttgacatcatttctgcaattgagtttgacaaatctggtgatcatcttgccactggagataggggtggacgcgtaggtttgtttgaaagaactga

SEQ ID NO: 7710 - DNA, 256 bp, Triticum aestivum
  Clone ID: uC-tsrow189025a06b1
ttgtcgcgtggcggacgcgtgggcggacgcgtgggaaaatttattttcaacaatcaaacaaatcaaattaaacaaacaaatcaaacaaatcaaattaaacaaatcaaattacttttaatatactaatatccttattaatcaattaattctttaatctttaattctcttttctcaaaaaataaataaataaataaaaatgtctcttacaccacctacttcttttgagaccttacctccacctcctctttctagtagt

SEQ ID NO: 7711 - DNA, 351 bp, Triticum aestivum
  Clone ID: uC-tsrow189025a07b1
tcttttccccacggatccttctcgtcttccacgtgattcgagtcgtctcgcctctctccgtcagcccaaacatggactcaagcaggcgcccgagtggaatccagcaattgcttgctgcagagcaagaagctcagcaaattgtaaatgctgctagggctgctaaaacggcgaggcttaggcaagccaaagaagaggctgagagagaaatagctgagtaccgtgcacaaatggaggctgatttccagaggaagctcaccgagaccagcggtgactctggcgcaaacgtcaaacgccttgagcaagagacaaacgtaaagattgagcagctcaagcagcaggcagcaaacatct

SEQ ID NO: 7712 - DNA, 256 bp, Triticum aestivum
  Clone ID: uC-tsrow189025a08b1
tctaaagcaaggtaatgaagttactttgcttttacgaaaacgggccaaaagtacataaacattccaacgggaaattgaggacactagtaaccagttttgacaagagcaacatctcagaacatgaaataactcagctaagaggctactagcaaaatcttaagagtacagagacttgttgcacgagtgagtcactgtaccaccatgtgtcataacttggaagtgctcaacgatgttggccaaattctcatagaaagct

SEQ ID NO: 7713 - DNA, 370 bp, Triticum aestivum
  unsure (1)..(370): unsure at all n locations
  Clone ID: uC-tsrow189025a09b1
ttttccacgcgtccgccattccgcagcccttcggtgagatcccggtgctcgaagacggcggtctgacgctttaccgtaagccttcttcatgttttctgttttatttttgattcagtaggcatattgtttttctaccaattattaagcaatttggtgggcgtgataaaaaaacccgaggggtactgatttctctccgcaatttattttcttgagaatcccgcgccattgcaaggcatattctccgcaaacacaagcccgggcttctaggagcaggcagcctcgaggagtcggcgatggtggatgtatgggtncgacgntggatgcccaccagctggagcccgtactcaagcccatcgtgtggaactgcatc

SEQ ID NO: 7714 - DNA, 353 bp, Triticum aestivum
  Clone ID: uC-tsrow189025a10b1
tttttctcttctctctgtcacacacccaaacccaacccaacccaaagtaacagtagcccgcggcggcctgcgcgatgcccgccgcggcattcgcctccgcgctcgcgtctcctcctccgccgtgggccccacgactgcctcctcggcacgctagcctgcgcctgctcccgccaaggagcagcagcaacaacagcggcggcggcggaggggacaagcccaccacctcgtgggtcagccccgactggctcacgtcgctgtcccgctcggtgctcggccgggggaacgacgactcggggatccccgtcgcctccgccaagctcgacgacgtgcagggacctctcgggggcgcgctc

SEQ ID NO: 7715 - DNA, 314 bp, Triticum aestivum
  Clone ID: uC-tsrow189025a11b1
tctgacccgaccgcctccacgcatcatcgacggtgaagcccgttgcgttgcgtggtagcgaccgtctccacagatcgggatcaggcggcgatggacttctccggcgatgtcaagcaggcgatcccgcggcccgccgtcgctttcggcggcgtcgggagcgctgggccgtcgccgctgctcaggggctggcgggagttcaggcggagcggcgcgccggtcaggttcctctgcttcgagggcggcgcgtgggctgatgtcgagggcgaggcggctgtgcctctgcgccgggcgttcctggacgggagggtggtcgc

SEQ ID NO: 7716 - DNA, 387 bp, Triticum aestivum
  Clone ID: uC-tsrow189025b01b1
ttgtcgctgcgccagcggatgatgtccgagtacaaggacaccgtcgagcgccgctactacacgctcaccggggaggtccccgaggacgaggtcatcgagcgcatcatctccgagggccgcggcgaggagatcatgagcgccgccgtcgccgagcacggcaagggcgccgtgctcgccgcgctcaacgagatccaggaccgccacgacgccgccagggaggtggagcgcagcctcctcgagctccaccaggtgttccttgacatggccgtcgtcgtacagtcgcagggggacaagcttcagaacatcgagcaccacgtgagcaacgccagggactacgtccactccggcaacaaggagctcggcaaggtccgcgagcaccagcgcggc

SEQ ID NO: 7717 - DNA, 196 bp, Triticum aestivum
  Clone ID: uC-tsrow189025b02b1
tgttatcttcatgtaagcctcctcctctccacctacaaagcaggagctcagtctcaggtgctgggatagctctgctagttcgtcgactttggaaatggccaccaactcgaggtcgaactccagggccaccttctccagcgagatccacgacatcggcacggtgcagaactccaccacgcccagcatggtgtactac

SEQ ID NO: 7718 - DNA, 174 bp, Triticum aestivum
  Clone ID: uC-tsrow189025b04b1
tctcacgcgtccgccacgcgtccggtaacgtcacttgttacacttccagtcatcatctttgagccgatgtcaatgcttcagaaaatggcagagttgatggaatattgtgacctgttagacaaagcagatgaatgtgaggatccacacatgcggatggtatatgcttctacatgg

SEQ ID NO: 7719 - DNA, 195 bp, Triticum aestivum
  Clone ID: uC-tsrow189025b05b1
attcgccgcctcggcagtcacgctttgacgcatgacagctaaaacaatgaaaattcgcagggcacgcaccaaaaaaaaaaaaaaaaaaaaaaaaaaaaaaaaaaaaaaaaaaaaaaaaaaaaaaaaaaaaaaaaaaaaaaaaaaaaaaaaaaaaaaaaaaaaaaaaaaaaaaaaaaaaaaaaaaaaaaggggggc

SEQ ID NO: 7720 - DNA, 348 bp, Triticum aestivum
  Clone ID: uC-tsrow189025b06b1
ttctcgcgtccgctcatctctctctgtctctctccccctctctattctcgcgatacggagggaggcgtgccgttcttcgaggagacgaagaagcagctgccagaaagataagcaaggaaacatcagctggtcaagatgacagctggtttacagctcggcgtgatcgggtctctcgcgctctccgttgcatcttcagttgccattgtcatctgcaacaaagctctcatcagcacacttggtttcccatttgctacaacattaacaagctggcatctcatggtgacctactgcaccctccatgtggcacaacgcttacatttttttgagcccaggcaattgatggacata

SEQ ID NO: 7721 - DNA, 401 bp, Triticum aestivum
  Clone ID: uC-tsrow189025b07b1
ttcacgtcgtgagcaggtgttgtattagtcgtgcaggatctctagaaggaacaaaagagagttcacgtgctacaagagtttatccagctatataactgaactgcagacaacgggattaatgacgactaatacaacacctgctcacgtcgtgactacatcttactgctcgatagtagcacacttggacagaagctgtgatggcttaacatgatacaatcgttgtttattttttgggcaactatacatcgttgttgagctgaaatatagatggctgtgctttgccaaatgaactttatcccatatagcaaagccatccatttttacatgcacttggattcttgtaaccagtaaacttgatcttggatcctgtgatgcagtgtactggtctactacttaaaact

SEQ ID NO: 7722 - DNA, 393 bp, Triticum aestivum
  Clone ID: uC-tsrow189025b09b1
tcttgccgctcgaccgccgcctagcaccgaaacagcgctggcttcggacgcgagcctttcccctcttccttcttctggcgattagggttgtccccagcgccgccggccagctgctggcaccggcgcggtacctcgttcctgccggcgcaccgccggccgcttccacccccccatacacctccgtcgccagagcctgcccgctcccccgccacccctcatcctgaggacttcctgctagcccccgccggcaagaaagcccgaggaccaccagcttttcacgaggaggccactgtctccgcatcttccactgtttcgctactgctaccgcctgtctgtcatctgcgtcagcggctgcagatccgccccggcatcatgtcttcagaggagctcaca

SEQ ID NO: 7723 - DNA, 298 bp, Triticum aestivum
  Clone ID: uC-tsrow189025b10b1
tgcccacgcgtccgccccaccccaccccacccccacccagcggtgccgccgccgcacaaagtccaaccctagatccagcgcccgatccgcggccatggcgacgcgccgggccctctcctcgctcctccggtcggcctcccgcgcgcgcgcggcctccccgtcgccgctcccccgcgcggccccgctccaccgcccgtccccggccggctacctcttcaaccgcgccgccaactacgcctccgccgccgccgccgccgaggcccccgccgagaagctgccccccacctccgacaagtac

SEQ ID NO: 7724 - DNA, 435 bp, Triticum aestivum
  Clone ID: uC-tsrow189025b11b1
tctccataagcagctgttgggacagggatgagattgtgttcaatagcatggacttgtcacggctacggtctttgacagtgtttgggaagtgggtgccattcctcgtctcggacaagatgaaggtgcttcgggtgcttgatctagagggtactagtaggacatcagatggtactgctagtgtaacagatgatgttctggagaagatcgtgaagcagtttcgtcgcctcaagttcatgtccctgcgtggatgcatggaagtcactcgtctccctgattcattgggtgccatgactcagctggagactttggatgccaggcacacctccatagtcgagctgccacctgctatcatcaccaagctacacaagcttcagtacattcgtgctggcaccaccaaagcaagacgactacaagcagcaacaagagcagcagcag

SEQ ID NO: 7725 - DNA, 365 bp, Triticum aestivum
  unsure (1)..(365): unsure at all n locations
  Clone ID: uC-tsrow189025b12b1
tcttttctttgccgtcgggttggcccactatgtcgtgctattcgtcactctctatcagcggctccccaccaacgcgcaactccccaaggagctccacccagtgttcttccttttcgtcgccgcacctagcgttgcttccatggcatggacgaggatttgtggagagttcaacgatggttccaagctcctttacttcgtctcgctattcctctacgtgtctttggtggtgcgcatcaacctctttaggggcttcaagttctcactggcatggtgnggcgtacacattcccgatgacgagtgtggccttggcgacggtgttatatgcatctgaggtagacaacgtgctgacacgggcactagcggtc

SEQ ID NO: 7726 - DNA, 356 bp, Triticum aestivum
  Clone ID: uC-tsrow189025c01b1
ttttcctgaaacgttcaaggagatcatcagcacctactgctgcgaagttcggctgctcggcctccgactcctgggcgcgatctccctgggcctgggcctcgaggaggactacatcgagaatgtgctgggcgagcaggagcagcacatggccgtgaactactacccgcggtgccctaagccggacctcacctacggcctgcccaagcacacggaccccaacgccctcaccattctcctcatggacccccacgtctccggcctgcaggtcctcaaggacggcgcccagtggatcgtccgttgacccccggcccaacgccctcgtcgtcaacctaggcgaccagttgcaggcgctgagc

SEQ ID NO: 7727 - DNA, 406 bp, Triticum aestivum
  Clone ID: uC-tsrow189025c02b1
tttgcggttatggttggtggattccccaggaaggaaggaatggaaaggaaggatgttatgacgaaaaatgtttcaatctacaaagctcaagcatctgctcttgaagctcatgcagcccccaactgcaaggttttggttgttgccaacccagcaaacaccaatgctctcatcctgaaggagtttgctccatctatccctgagaagaacatcagttgtttgacccgcctagaccacaacagggcactcggtcagatttctgagagacttggtgtccaagtttctgacgtgaagaatgctattatctggggtaatcactcgtccagtcagtaccctgatgttaaccacgccactgtgaagacttccagtggagagaagcctgttcgtgaacttgttcaagatgatgaat

SEQ ID NO: 7728 - DNA, 390 bp, Triticum aestivum
  Clone ID: uC-tsrow189025c03b1
tgtcctcgcagccgcagcggcgcgcacccctctccctccttcctgaagacagcgccgccgtcggccagagcacaggatggcgaccgtccccgctcccgcagccgagaccgcggcctccaccgcgcgcacggtgaaggatgtcaacccccacgagttcgtcaaggcctactccgcgcacctcaagcgctccggcaagatggagcttccagagtgggttgacattgtcaagactgcaaggttcaaggagctgccaccttctgatgctgactggtactacatcagggctgcctcgatggcaaggaagatctacctgaggcagggaatcgggatcggcggcttcagaagatctacggtggccgtcagaggaacggttcacgcccaccgcacttt

SEQ ID NO: 7729 - DNA, 263 bp, Triticum aestivum
  Clone ID: uC-tsrow189025c04b1
atcaccactctgaacggcgcgcgcacactggaatccacgggcgaaaccagcagagtggagaaggttcttccattccatggcttccacggccctcgcgagcgtgtgccccatcgcgtccctctccgggcgctcgtcgccggcgagctaccgggccgtgaggtgctggggcgcgaggagggggaggcggcggaggtcggcggggctgagggcgaggtgcgcgggcggccagccctccgccgtgaagcccggcccggagagccccg

SEQ ID NO: 7730 - DNA, 298 bp, Triticum aestivum
  Clone ID: uC-tsrow189025c05b1
ttttcggctatgagcacgggtacggcggcggacatgcgcagcacggccatggccacgagcacgggtacggcggacacgtgcagcagcacggatacggcggtggccacgcgcagctcgggtaccctcctgccgccggtgcctaccctccgcacggcggttaccaggcgcacggctacgcgccggcggcctacccctctcacggggcgcaccacggtcacatgggatcgtaccacaccgggcatggcggcgggcaccaccacggcggcaagcacggaggcaagtaccatggcggcaagca

SEQ ID NO: 7731 - DNA, 235 bp, Triticum aestivum
  Clone ID: uC-tsrow189025c06b1
tttttgcctggggagcttcaagaacctggagcgcctcgacctcggccacaactgcctcgtcacgctcgagggtttgtccgcgtgcaccaatctcaagtggctctcggttatagaaaacaagcttgtgagcctgaaaggtgccgaagtcctctcgaagctacaggtactgaatgctggcaaaaataaattgacaagaatcgatgaggtcaaatctatgacaagcctgggagccttg

SEQ ID NO: 7732 - DNA, 390 bp, Triticum aestivum
  Clone ID: uC-tsrow189025c07b1
tcggttgttgttgccttcacaagagaaaggacttggttttgtatttcaggcatgctttcaatgcactttctaaaagaggcggtatatttgtgatggatgtatatggtggcacatcatctgaatgcaagcttcgtctccagaggagattccccagcttcacttatttctgggagcaagaagagtttgatatcataactcgtgaaacaaggatcagcctccactttcaagttggaaagaagcaaatgatacggcatgctttcacgtaccattggcgcctgtggtcgataccagaaatcaaggactgtttggaggaagctggatttaagtccatccacgtctgggtcagggagatgccggacaccaaatcaagcggaaacgcaaaggagtaca

SEQ ID NO: 7733 - DNA, 316 bp, Triticum aestivum
  Clone ID: uC-tsrow189025c08b1
tctcgcacgcaagggccgccgcggccctcgccgccggcgtcgacgacgagcacgccgcctggatggcgaagcacccgtccgccctgggcaagttcgaggagatcgtggccgcgtccaaggggaagcagatcgtcatgttcctggactacgacggcacgctgtcccccatcgtcgatgaccccgacgccgccttcatgagcgagacgatgcggatggccgtgcgcagcgtggccaagcacttcccgacggcgatcgtcagcggtcggtgccgcacaaggtgtttgatttcgtgaagctggcggagctctactacgcc

SEQ ID NO: 7734 - DNA, 306 bp, Triticum aestivum
  Clone ID: uC-tsrow189025c09b1
tctcggacgcgtgggcggacgcgtgggcggacgcgtgggcggacgcgtggggcgcggacggcccgaattacgcggggccccggcggccgccgttccggttggcccgggtggcggtgaacggcggctggccggaacgcttcttcttaacggtttccttcttttcggctttctttttcttttggttggggttggcaaggttcttcttttacggcggcggcggggccttgggcggccgccgcggggttgcaacggccaagttgcttaaaagcagggggtccggcaacggcgggaacaagaaggaaggcg

SEQ ID NO: 7735 - DNA, 404 bp, Triticum aestivum
  Clone ID: uC-tsrow189025c10b1
tctgggcgccgtgcacacctacgcggaggtgtcagagctctcccgccgctgcgcggcggggctgcggcggctcggcgtggggaagggcgacgtggtcatgaacctgctccgcaactgcccggagttcgccttcgtgttcctcggcgcggcccggctgggcgccgccaccaccaccgccaacccgttctgcacgccgcacgagatccaccgccaggcgagcgcggccggggcgcggctgatcgtcaccgaggcctgcgccgtcacaaggtgcgcgccttcgccgccgacgcgggatccccgtggtcaccgtcgacgggccggcctccgacgacggcggctgcttcgcgttcgacgaggccctgctgcccgcggagccgctcgccgccgacagcaggtcgacccga

SEQ ID NO: 7736 - DNA, 274 bp, Triticum aestivum
  Clone ID: uC-tsrow189025c11b1
tcttgagtttgtatactcgataaattaagcgggcgcggtgtgcgcgctcgcggcggtgtgggcggatgtgacgttccgcctcgggcgcgaggcgtacggcggtcaccgcagcccgccggggctgacgggctacggcgtgtgcacgtgcgtgctgcacgcgctcatgcgctttgtgccgcctctgcgcacgtccgcggtgctgaaccgcgcgttcatcgccgacccgcactgtgcggtgaccgtcacagcccccggctgcacccccggtgtggac

SEQ ID NO: 7737 - DNA, 182 bp, Triticum aestivum
  Clone ID: uC-tsrow189025c12b1
tctatccaggcaaaggcaagtgcaagtcctcccaaatccacgcatccctcgcccgcgtctcctcccgttgccgcagcagcaagagaatgggcagcgtcgacgcctccgagacgacggtcaccgggtgggccgccagggacgccaccggccacctctccccctacagatacaccctcaggaaa

SEQ ID NO: 7738 - DNA, 260 bp, Triticum aestivum
  Clone ID: uC-tsrow189025d01b1
tgttcaacgacatgagcggcaaccacgtcggcgtcgacgtcaacggcctcaactccgtcgacgccgacaacgccggctactacgacgacggcaccggcgccttcaggaacatcagcctggtggaccgcaagcccatgcaggtgtgggtggacttcgacggccggaccatgcaggtcaacgtcaccatggcgcccctgcaggtggcccggcccaagaggcccctgctctccgccaccgtcaacctctcctccgtcatcgac

SEQ ID NO: 7739 - DNA, 387 bp, Triticum aestivum
  Clone ID: uC-tsrow189025d03b1
tgttaaaagcaacttctatcggtccaaagattaaacggttccggatcgataacgaggaatccatggaattgaagataacatgggaggaggctcaagaattgcttcgccctcccctgaaggccccttcggttgttattgttgatggccatgagtttgaggaatatgaggagccaccagtacttgggaggaagacatattttgtgactgaccaatcaggtgagaatcatcagtgggctcagtgtgaggattgttccaaatggcggaaactgccaatagacgcccttttaccctctaagtggacctgctccgacaataaatgggatcctgaaaggatgaacttgtgtctctccacaagaggcaagcatggaggaacttgcagaactgatt

SEQ ID NO: 7740 - DNA, 295 bp, Triticum aestivum
  Clone ID: uC-tsrow189025d04b1
ttcatggtaaggattggcacaagcgatcaggatctggagtccttgatcgctgccagccccgttctgcagtcccttaggctcatcgtcaatagccccaagcacgtccggctccgcagcaaaagcctcatgtgcgcgctcgttgggctatccacggtggaggagttgaccgtggtggacacgccgctcctggcgcggttttgttggtccgggcctggtaagggggggaggatcaggatcgtttgtgctcccaacctgcgggcgctcggttacctggacacaagagttctcaagctgc

SEQ ID NO: 7741 - DNA, 507 bp, Triticum aestivum
  Clone ID: uC-tsrow189025d05b1
tgttgactgccccaaactgattcaagttcctgcatttccgccatccgtctctgagcttacagtggagcgtacattattgatatctaatatgaagcttgctccttattcttcatcacgatcagagatactcaccctggacatttctacgaccagtgtactttccaggggactgttccatcaaagccatctagcatctatcatagttttaaacataaacgctggctgcaagcatcttgttgccgcagagggactccacacctttacttctctccaaaagcttcagctgtgccactctgacatatcagatcagaatttggaaagtcttcttcaggtgctgccctctttgtactcgtttgagatgatagatctgcccaacatgacatctctggtgccagcaaataatagtttgtgtacaacagtcacagagttgcaaatatccaactgtccactgctctcttctgtagtctccttgagtacttttgtttcactgaaacgtttggtgattga

SEQ ID NO: 7742 - DNA, 326 bp, Triticum aestivum
  Clone ID: uC-tsrow189025d07b1
tccgcagcggctttacctaccgagaagaagagagaaaaaaggttcgagtgcgttgcagagtgagaagagatggctccggtgaagctgtacggcgcgaccctgtcgtggaacgtcaccaggtgcgtggcggcgctggaggaggccggcgtcgagtacgagctcgtccccatcaacttcggcaccggcgagcacaagagccccgaccacctcgccaggaacccctttggccaggtgccagctttgcaggatggtgacttgtacgtcttcgaatcacgtgctatttgcaagaatgcgtgccgcaagaacaagccagagctgttgaagga

SEQ ID NO: 7743 - DNA, 302 bp, Triticum aestivum
  unsure (1)..(302): unsure at all n locations
  Clone ID: uC-tsrow189025d08b1
tttcaagtttcttttgtgtctagttaattgatcttgtgttgggacgaaaggaagggaataagtggactgtgctctagggatctgatattgtaggctaattagtacggtcattgaaacaataatcaggaggcaattccaattatttaatgaggtccaagattgtgatatggggtgaaggtaccactaacagttgccaagattaatctcgtgtataggagcttaggatcttcaatggtctcaacttcgacgattttataggtgcctgttactggcttgcagatnggcgtgccacgtatattaca

SEQ ID NO: 7744 - DNA, 261 bp, Triticum aestivum
  Clone ID: uC-tsrow189025d09b1
ttatgaggaccccagacccgagccctagacagccaacccaaaccttcccgaaatcccaatccagaccatcagcttcccccaaattccccacgccgcgccgagccgccgatcgaaccgcagaatctcgagcgccgcccgcgatgccgaagaagatgggcgtcaactccaaggcggaggcctgccgcgagcgccgctccgccgaggagtcggaccgtcgccagcgcgccgagcgcgccaaggagggaggagtactggcgcgag

SEQ ID NO: 7745 - DNA, 431 bp, Triticum aestivum
  Clone ID: uC-tsrow189025d10b1
tgctgctcctgccaaggcggcccgtgctaaccccgcccgtgtctggtgtgtcaaccacggagaacgcagccatgcgccggggatgcccggctccttcgttgcctctgatattgcctccgccacgcgccctgggcctgccaccaccttgccggctgctgctggtgctgatcccgtggatgtccggtgcgcgatccgtgcccatggacgcgagatggctgaagacgaggagtccgcttgccaccaccgcaagcgcccggcttccaaggctccaatctgcctgcccgccactgctgctgcgcctgtgaagaaggtctctcgtcaggtcgcttcaaggcttgctctttcgtcggctctacaccactgcctgccactgctgctgcgcccagtgtgcaaccgaagccgcagatcagcatgcgcgaactgatcgagaa

SEQ ID NO: 7746 - DNA, 299 bp, Triticum aestivum
  Clone ID: uC-tsrow189025d11b1
tctcggacgcgtgggcggacgcgtgggcgagggcgcgcaaggcgcggcgcgggcgcgttcggtcttcggcggcgtagatcggacgctggatcgggaatcgcattggcggcgcccgatccagatctgaaggcttccgtctacttcaaccagggctgcctccgatggtcctgctttcggcggcctttgtcgtcggagttgtaccggtttggcggctggaggtgggaaggtggctccggagaaatccgaggccagcagtgctggtcacgacggcggcgacgcccgagggcgccgtacccttc

SEQ ID NO: 7747 - DNA, 366 bp, Triticum aestivum
  Clone ID: uC-tsrow189025d12b1
tggcgaggtgcagctccccgtccaccactgcctgctggcgctcccgggggtccggcgggagctgctggcgcgggtgatctcgcacccgcaggcgctggcgcagtgcgagcacacgctgacccgcatgggcctcaacgtggcccgcgaggccttcgacgacacggcgggcgcggcggagcacatcgcggcgcacgcgctccgcgacacggcggccatcgcgtcggcgcgcgcggcggagctgtacggcctccaggtgctggcggacggcgtgcaggacgacgccgggaacgtgacccggttcgtgatgctggcgcgggagcccatcatcccgcggacggaccggccgttcaagacgagcatcgtgct

SEQ ID NO: 7748 - DNA, 320 bp, Triticum aestivum
  Clone ID: uC-tsrow189025e01b1
tttacgcgtccggctcatcatcatcctcgacaccaaagctcatcttcttctccttgaaatctttttgggttcatcagatttggaggatgtcttgcaactgtggatccggttgcagctgcggctcagactgcaagtgcgggaaggtgtaccctgatctgacggagcagggcagtgccgccgcccaggtcgccgccgtggtcgtcctcggcgtggcgcctgagagcaaggcaggtcagttcgaggtggccgccggccagtccggcgagggctgcagctgcggcgacaactgcaagtgcaacccctgcaactgttaagctgca

SEQ ID NO: 7749 - DNA, 386 bp, Triticum aestivum
  Clone ID: uC-tsrow189025e03b1
tttcctcctcctcctcctcgcctccccgcggccacacctcgactcgctccctcgagtagatcatctgttccatccttttgaggctgagatggcggctaccttcaatgttaatgctgaggcaggccttaaaaagcttgatggctaccttctgtctcgcagttacatctctggataccaagcttccaaggatgacttggctgtgtattcagagttctcagttgctccaccatcaacttgcaccaatgttgcaaggtggtacaatcacattgatgcactcctgaagctgagtggagttactgcccctggcaaggtgggaaggttctgtcataagttgtccctgaaacctcaactactgatgttgctgaggctcctgcagctgatgatga

SEQ ID NO: 7750 - DNA, 447 bp, Triticum aestivum
  Clone ID: uC-tsrow189025e04b1
tgtcaaacttctgggctgttatggaggatcctacaggtggacggctgggcgacgtgctgattctcggtggaagggagcgaggaggcagagagttcgatcagagaaagcaattgtgcaatctctttcttcaggtaagtgataccctgacaacagtttgatactattgttgtatttgattcctttcgcttcagttacaggctataactatcctgcaagatggtgggacgaatcagaagtccaccaaccgcttgcacgtgtcatgcgtgtttgtcggaacagatctgcagctacccctatcctctccatatcagagaaagatggatcggtcgtatgtacaccaagctggatcaacagagcttactacgttgcattaaccaatacctttgtggtcgtcaactgaaatggattatttttttcaagtattatttcatggattactgtttgcta

SEQ ID NO: 7751 - DNA, 378 bp, Triticum aestivum
  Clone ID: uC-tsrow189025e05b1
tcctcacgcgtccggcgcacacaaacacacccaagaaacacctgagggacggtgcagctctgctagcaagtgcgcgatggcgcctcctccccacgagaacgagacgagcaggtcggagtcggcaccggccacccctgtgaagacggtggacgtgcagacggcggcggcaccggacgtgggggtgacggcagtggacgtgcagacggcggcggcaccggccgtgggggtgacgacggtggacgtgcagacggcggcaacgccggccgtggacacgaagacggtggcgacaccggcggtggaagtgacgacggtggacgtgcagacggcggcgagggagcagcaggacggcatgatgtacctggacgtgaggacggagga

SEQ ID NO: 7752 - DNA, 520 bp, Triticum aestivum
  Clone ID: uC-tsrow189025e06b1
tttaagagattcagatccatcctcgcctccctcggtccgtccccggtttgttctcccaccagccccagatccatccggcgatctctgtcgccgccatcgccaggataggccccagaaaacccagcccagtggaaggggtgtgcgagtaggagaaggccagcagataggatgttcctgtgggactggttctacggggtgctggcctcccttggcctgtggcagaaggaggccaagatcctcttcctcggcctcgacaacgccggcaagaccactctcctccacatgctcaaggacgagcggctggtgcagcaccagccgacgcagcaccccacgtccgaggagctcagcatcggcaagatcaagttcaaagccttcgacctcggcggccaccagatcgctcgacgggtctggaaggactactacgcaaaggttgatgctgtagtatacttggtagatgcatatgacaaggagcggtttactgaatcgaaaaaggagctggatgctctcctttctgatgatt

SEQ ID NO: 7753 - DNA, 428 bp, Triticum aestivum
  Clone ID: uC-tsrow189025e08b1
tctgtgccaagagagccctcagcaaccagcaccaggtccgcgttgagatcgagtccctctttgacgggactgatttctcggagccactgacccgtgcgaggttcgaggagctgaacaacgatctgttccgcaagaccatgggaccagtgaagaaggccatggatgatgctggtctcgagaagacccagatccatgagattgttcttgttggtggcagcaccaggattcccaaggtccagcagctcctcagggactactttgacggcaaggagccaaacaagggtgtgaaccctgatgagggctgttgccttcggagctgcagtgcagggaagcatcttgagcggcgagggcggtgacgagaccaaggatatcctcctcctcgatgtggcgcccctcaccctcggaattgagactgttggaggagtcat

SEQ ID NO: 7754 - DNA, 279 bp, Triticum aestivum
  unsure (1)..(279): unsure at all n locations
  Clone ID: uC-tsrow189025e09b1
tcccacgcgtccggttctttcacgcgatccagcggttccgcgagcccttcgagcagttctttgcgggcgaatgccctgatgccgtcgtcgccgacagccacttccagtggtccgtcgacgccgccgcggagcacggcgtcccgcggctggcgttcctcggcaccagcatgttcgcgcgggcctgcaccgacagcatgctgcgcaacaacccgctggcgtcttgccccgacgccgtcgtctccctgccggggctgccganccgcgtcgacatgttacgga

SEQ ID NO: 7755 - DNA, 422 bp, Triticum aestivum
  unsure (1)..(422): unsure at all n locations
  Clone ID: uC-tsrow189025e10b1
tctgggagagagggaaagatggtgtcccagaatcagaggacgccgggagaccaggtgttctggcccaaggtggtgctcaagaaatggctcaacctcaggagcaaggacgccaagttcaacgccgacgaggacgacggcgacgacgacggggagcaagaggagagctgcggctgcgacggcgccgaggcggagcgcgaggccggaggcgtggacatcgccgaggagagcctggacgccgcgccgtacaagctgcggcggcggaactcggagacgatgcgcgcgcagtacatcagcaccaaggagctcaggatctgcattggcacgtacaacgccgccggcatagagccgccggaaggcctcgacatgncgagtggctcggcaccaccggcggcgagcaggccgactggtacgtgttcgggttc

SEQ ID NO: 7756 - DNA, 504 bp, Triticum aestivum
  Clone ID: uC-tsrow189025e11b1
tctctctccctctctctcgcctcctccctccccctgcaggaagctcgtcgagatgtcgtccgaggcggcgaaggtggtggtgccggagtcggtgctcctcaagaggaagcgggaggagctctgggccgccgagaagaagaccaaggccgtcgaggagaagaagaaatccagcgagaacgtcaaggtcatctacgcccgcgccaagcagtacgccgaggagtacgatgcccaggacaaggagttggttcagcttaagcgtgaggcccggatgaagggtgggttctatgtcagtcctgaggctaagctgctgtttgttgtcagaatcagaggtatcaatgccatgcacccaaagaccaagaagatcttgcagctgttgcgtttgagacagatattcatggagtgttcctgaaggttaacaaggccaccatcaacatgctccgcagggtcgagccatatgttgcatatgggtacccgaacctgaagagtgtgagggagttgatctac

SEQ ID NO: 7757 - DNA, 306 bp, Triticum aestivum
  Clone ID: uC-tsrow189025e12b1
cccacgcgtccggtggtggtgcgagactccggtccagagcgggggcggccggccggcagaccgccaagaaaccagaccacctcccgtctccgtcctcggccaccaccaccgccacctgcccgcgcctcccctccaccgctcctcctacaagaacccccctcgcctgcctgcgctgcagcctacgccggcgagtcaacctctctctcatcttcgggtcgggggatctcgcgcgctcctcccggaatcaggcgccggcggtcggagggacaaagacacggacatggagggcggtcgcggcggccggtg

SEQ ID NO: 7758 - DNA, 276 bp, Triticum aestivum
  Clone ID: uC-tsrow189025f01b1
tatcagtaaacagagagctcgctctccgtgaatgatgtcgaggaagaagaggaagaagaagaagcagtgtggagcacgctgctgctacctggtcatgctctcagcagtgtgaatctccagaagcatgcttgccgtgccttcttccgggtgcaccggaggctggcatgtgagcaggggtgcttcagtgacgcagaagaaaaaaggcaagtcttatcggcagggaaggctacgcctttcttccaggtctccctctctccatctaaatctgtgtttgga

SEQ ID NO: 7759 - DNA, 304 bp, Triticum aestivum
  Clone ID: uC-tsrow189025f03b1
gttcgcgcacacacgcacacgcacaaagcagccgtctcctcctacgccaactaatttaaccagcttaggtttatcatcttttgtttgccgatcgatcgccgttgatctaccacgatcgttgaaatggggtctgtgccggaggagtcggttgcggcggcgccggaggtggtgttccggtcgaggctgccggacatcgagatccccaacgagcagacgctgcagagctactgcttcgccaagatgtccgaaggtggggtcccgcccctgcatcatcgacggccagacgggcgcctcctacacctac

SEQ ID NO: 7760 - DNA, 383 bp, Triticum aestivum
  Clone ID: uC-tsrow189025f04b1
ctctcatcttcttcctcttgcaacgaaacgagcgtctaggttaacagctagctaaagattcggacgatggccgttcttgtggcgaggcaggggcgcgagctgcagcggtacagcgcgagcaccggcgggcgcatcgtggtggggtgcatcccgtaccgggtgcgcgcaggcggcgacggcgacggcgagggcgagctggaggtgctggtcatcagctcgcagaaggggcacggcatgatgttccccaagggcgggtgggagctggacgagtccatggacgacgcggcccggcgcgaggccctggaggaggccggcgtccgcggcgagatgggcaaggtgctcggctgctggcactaccagagccgccgctaccagaccaccta

SEQ ID NO: 7761 - DNA, 414 bp, Triticum aestivum
  Clone ID: uC-tsrow189025f05b1
ttctcaagaagagatctggagaagggagaagcggaaggccattgctagctagctccccgccgtctcctccctcctcgcttggtgtcgccatggccaccatcctggagaacatccagaaggcgcggttcctgccgacgaggccgctgcgggacgacctgcccaccttccagggcggcgggggcggcaagggggaggagagccacctcatgggcctgcggaagcgcctctccagcttctccggcaagatccagcccatctcctccgcgtccgccgagtgggcgttccggcgcacccggtcggcgcgttcgctggccgccgagttcgccggcggcccgctcaagcgctggtgggactggggcctcggctggctgctctccaagaagctcggcttcgccggcgacctggagatgaacg

SEQ ID NO: 7762 - DNA, 469 bp, Triticum aestivum
  Clone ID: uC-tsrow189025f06b1
tttcacgcgtccggattgggaggtcccagattgggtcattgtaccgggaggcaatcttggaaacatatatgctttctacaagggattcgagatgtgccgtgttcttggtctcgttgatcgtctgccacggcttgtctgcgcacaggccgccaatgccaacccgctgtaccgctactacaagtcagggtggacacaattccagccacaggtggctgagccaacatttgcgtcggcgattcagatcggtgaccctgtatcggtcgaccgtgcggtggtcgcactcaaggcaacaaatggcatcgtcgcagaggccacggaggaggagctcatgaatgcaatgtccctcgcagaccgcaccggcatgtttgcctgcccgcacactggggtcgcgctcgcggctctcttcaagcttcgggaagagggcaccatcggggcaaatgaccgcacagtgtgtcgtcagcacggcgca

SEQ ID NO: 7763 - DNA, 294 bp, Triticum aestivum
  Clone ID: uC-tsrow189025f07b1
tgtttgacaccaactaccacttcatcgtccctgaattggctcctagcaccaagttctcctactcttctcacaaggctatcaatgagtacaaggaggctaaggcgcttggcgttgataccgtccccgtacttgtcggaccagtctcatacttgttactctcaaaggccgccaagggcgtagagaaatcattctctcccctttcccttcttagcagcatccttcccgtctacaaggaggttattgctgagttgaaggcagctggcgcttcatggattcagtttgatgagcccaccc

SEQ ID NO: 7764 - DNA, 339 bp, Triticum aestivum
  Clone ID: uC-tsrow189025f08b1
tttgtcacgcgtccgccacgcgtccgtgcaaattgatcttcagttggtgtcctggaagacagtcactgaaataggcaatgacaagacgatcttgaagaagatcctccaggagggtgaaggctatgatcgtcccaaagactgttcaactgtcaaagtgaaacttattgggaagttggatgatggcaccatgtttgtaaagaaaggtcatgatggtgaagagccattcgagttcaagactgatgaggatcaggtgattgaagggcttgacaaagcagtgcttagcatgaagaaaggagaagttgcctttgtgactattcccccagagcatgcatttggatc

SEQ ID NO: 7765 - DNA, 251 bp, Triticum aestivum
  Clone ID: uC-tsrow189025f09b1
ttccacgcgtccggcaatcttgtctacagcgagagggagatccattccaaaccaaagtaccctagctagccagctagcagtagcagtgttggatgaagcagagcggcatggagagcagcctggtggcgcggcaggtgccgggcagctacggcctgccgttcgtctcggccatccgcgaccggctcgacttctactacttccagggccaggacaagtacttcgagtcccgcgtccacaagtacggctccacc

SEQ ID NO: 7766 - DNA, 453 bp, Triticum aestivum
  unsure (1)..(453): unsure at all n locations
  Clone ID: uC-tsrow189025f10b1
tcggctcgtcgacggcgggatgggggaggcgtcatctccggcgatcgccaaggatgtcaccgagctgatcgggaacacgccgctggtgtacctcaacaaggtgaccgacgggtgcgtggggcgcgtcgccgccaagctcgagtccatggagccctgctccagcgtcaaggacaggattggatacagcatgatcaccgacgcggaggagaaggggttcatcgtcccaggcaagagtgtcctgattgagccaaccagtggcaacacaggcattgggctggccttcatggctgctgccaagggttacagacttgtactcacaatngcccgcatcatgagttggagaggagaatcatcttgaaggcttttggtgctgagctggtcctcaccgacccactcttgggaatgaaaggagctgtccanaaggcggaagagctggcagcaaagacacctaac

SEQ ID NO: 7767 - DNA, 525 bp, Triticum aestivum
  Clone ID: uC-tsrow189025f11b1
tctgagaaatcagagctggcaatggagtctacgctaatcacgagattaccccccctcctcccctctccctccaagtccagccccctctcctcaccccccctcgccggagcgcgccgcatcgcctccatttccttctcttccgtcagcgtgtgtggcgtcttgcgtccccgcggcggcgttacctcgtcggtcaccgccgcagcagcggcgctcggcgaggccgcagagcccgggtctgaggccatattgctcagtgttcagggcatgatgtgcgacgggtgcgctgcgagtgtgaagcggattctcgagagtcaacctgaggttacttctgctacagttgattataaggaagcaagggctgtcgtgtggacaactcctgatgtcaaggtggcagaagattggcagaaacaatgtggagagaaactcgcaagtcatcttggtacttgtggatttgagtctcgccccaagggtaaggtgaagcctgataaagtcaactctgagtcgtaactgctgccgcagatgagc

SEQ ID NO: 7768 - DNA, 451 bp, Triticum aestivum
  unsure (1)..(451): unsure at all n locations
  Clone ID: uC-tsrow189025f12b1
tctctaatctggtgtacatttccaaccttgccatgacagagttcatatccctctcgctgtccctttgactgactggaattattgatacgcgtagaaatctctctcagccttcaattttctttctttgtttattggacggtttcttggtagttggcgagcagtgctccagctccatccaggggccacgaacgtgggtctggaggagatctgagcctcctccgtgaggaaggaaatttgctaagtccacctaagatttcatcgacgatcacttcgacacatgagatgaaggcaagaagcagcttctacgctcagtgacagctcggtccttccatcccattcccaggtgaagatcaatggctactactagtagtacggctggnggatctcacggcagttctcggccctgctatcctcggcggtctggaatgggtgctgatcctgctgatgctgc

SEQ ID NO: 7769 - DNA, 299 bp, Triticum aestivum
  Clone ID: uC-tsrow189025g01b1
tttatagatcaccggctcaccaccacacagacaagcaagaatggcgatcgccgtgagcgggcactggacgcggctgcggacgctcggctgcggcgcgtcgggggccgtggtgtcgctggcggccgacgccgcgtcgggggagctgttcgcggtcaagtccgtgcgcgcggcggacgcggcgcatctgagccgggagcaggggatcctctccgcgctctgctcgccgcacgtcgtcggctgcatcggcggcggtggcgaccgcgacgggtcctaccacctcttcttcgagttcgcccccg

SEQ ID NO: 7770 - DNA, 298 bp, Triticum aestivum
  Clone ID: uC-tsrow189025g02b1
ttttctttctttgagcataccattgcatgaagcgactaacaaagagcagctagaagtgttccatgagaagaaagccgcactggacttggatggaaaagaagtgtctaatgaggaaattgtgagaccaacagttccactggaggcatgcttagcaagtttttcaggccgagaggaagtgcctgatttttacagcactgcattgaattcaaaaacaacatcaattaagactgttggctttaaaacttttcctgattacctggtgcttcagatgcgtaagtttgtaatggaagcaggatgg

SEQ ID NO: 7771 - DNA, 106 bp, Triticum aestivum
  Clone ID: uC-tsrow189025g03b1
ttttgatttgattcaagaagtaccagaagaagatcggcatataaatctccaactggagatttatatgccgatcttcttctggtacttcttgattcaaatccagcgt

SEQ ID NO: 7772 - DNA, 344 bp, Triticum aestivum
  Clone ID: uC-tsrow189025g04b1
actaactaaacagtaaacagagagctcgctctccgtgaatgatgtcgaggaagaggaggaagaagaagaagtgtggagcacgctgctgctacctggtcacgctctcagcagtgtgaattcccagaagcatgcttgccgtgccttcttccgggtgcaccggaggctggcatgtgagcagggatgcttcagtgatgcagaagaaaaaaggcaagtcttatcggcagggaaggctacgcctttcttccaggtctccctctctccatctaaatctgtgtttggaggagggggctacggttagtttacccaccggtttactgcgtccttgtgagtttgtgatcattatc

SEQ ID NO: 7773 - DNA, 305 bp, Triticum aestivum
  unsure (1)..(305): unsure at all n locations
  Clone ID: uC-tsrow189025g05b1
tatcgacctgcgcgccgccacggaggtcatctgctcccggacgccgtcgcagctgcagatcatgaagcagacctaccgcgcccgcttcggctgctacctcgagcaggacatcaccgagcgcacctacggcgaccaccacaagcttctgctggcgtacttggggatcccgcggtacgagggcccggaggtggacccggcggcggcggcgcgcgacgcgagggagctgtaccgcgccggcgagaagcggctcggcaccgacgagcgcgccttcatncgcgtcttcaccgagcgcagctgggcgcacc

SEQ ID NO: 7774 - DNA, 377 bp, Triticum aestivum
  Clone ID: uC-tsrow189025g06b1
ttgctctctcgcctttccccatccccctccgctcgctcgctccgggtctccctccctcttcacacccacctcacctcctccccctccctcttcgcgtgcccaagaaaggaaccaccaggcaggaacggcgtgagcgcagctggggctggagccggattgaccccgttcgtctccagagacggcggcacgggcgcaggaactccggatcggcgctcaagaacccagagtccgcgctgatgtacacgttggtgatttcttctacctagacatactccagagcagcagctcagccgccgtgatctgtaatcgccgttccaaaagagagcagtttagaaaggttgtcggtggcccaagctctgatcttcagcctgcatcta

SEQ ID NO: 7775 - DNA, 329 bp, Triticum aestivum
  Clone ID: uC-tsrow189025g07b1
tcttaagcaagcagcgctcaccaccacccacccagcaggtcatgcggcgctcggtagccatgaactgcggaagcggtcccgctccggcgacgatggtgcgctgcaggcagtgcagcgccagcgtcgccgcgccgcccggtgcccgtgccgtccagtgcgcgcagtgctgctgcgtgacccgcgtcggcggggctggccgacagctcagtgtgatgcgccccatcccgaacttcggcggtggccgcggcaagaagcgcgccgtgctggtggggatcaagtacaccaacactcgcgcctgcgagctgaggggccccataacgacgtcaagt

SEQ ID NO: 7776 - DNA, 338 bp, Triticum aestivum
  unsure (1)..(338): unsure at all n locations
  Clone ID: uC-tsrow189025g08b1
tcgtaaaggtatactaccgaaggacaagacaacggtgctgaccaaggcggcggggtacctaaagacgttggaggcgcaggtctctgagctggaggagaagaacaataagctggagaagcacatcccgacctacgactgcgaggaggacgtgccgcaccagcagaggcggcagagggccaaggtccagatcaccaaggcggcgtcggacgaggtggtgaacctgacggtgatggtgatggtgggagtgtgacgttggtgnnagctgtgtgctccgcatcctggagtgcctccggtggatggagcaggtcagcgtcatgtccgtcgacgccgacacctac

SEQ ID NO: 7777 - DNA, 279 bp, Triticum aestivum
  Clone ID: uC-tsrow189025g09b1
tcttagggctcaccaatccaagccatgacgccaaggtcaaggaattgcttgtttcagtatgcaacggggcagtggagactttggtgaagacctctcaccaagttatctccaaggccaatagtaaattggataataatggcaatggcaacagcaatggaagtggcactggcagtagcagagctggggaaggggtgggtggagacagtctctagcacattggcagtgccaagcaacaggaattttgtgcttgatgttactgggaggggtgacatttgagac

SEQ ID NO: 7778 - DNA, 354 bp, Triticum aestivum
  Clone ID: uC-tsrow189025g10b1
tcttaaaaaaggttcgagtgcgttgcagagtgagaagagatggctccggtgaagctgtacggcgcgaccctgtcgtggaacgtcaccaggtgcgtggcggcgctggaggaggccggcgtcgagtacgagctcgtccccatcaacttcggcaccggcgagcacaagagccccgaccacctcgccaggaacccctttggccaggtgccagctttgcaggatggtgacttgtacgtcttcgaatcacgtgctatttgcaagtatgcgtgccgcaagaacaagccagagctgttgaaggagggcgacataaggagtcagaatgtggatgtgtggtcgaggtggaggccatcagtacac

SEQ ID NO: 7779 - DNA, 407 bp, Triticum aestivum
  Clone ID: uC-tsrow189025g11b1
tctcccacgcgtccgaggagatttcatgtctgatcttgacgttcagatcccaactgcctttgacccctttgccgaggcgaatgctggggacgctggtgcagctgccggatcaaaagactacgttcatgtacgcatccagcagcgtaatggtcgcaagagcctgaccactgtccagggtctgaagaaggagttcagctacagcaagatcctcaaagacctcaagaaagagttttgctgcaatggtaccagttgtccaggacacagaacttggacaggtcattcaactccagggtgatcagaggaagaacgtctcaaacttccttgtccaggccggcattgtgaagaaggaacacatcaagattcatggtttctgagcaactgccagctccatatcagagtctacatgc

SEQ ID NO: 7780 - DNA, 515 bp, Triticum aestivum
  Clone ID: uC-tsrow189025g12b1
tagccgccgccagcagctgcgcaaaggctcctcaaaccctaaccctagtcctagcttagcttccttcttctcgatctagctagagccatggcgccgaccaagggcgaggggccggccatcggcatcgacctcggcaccacctactcgtgcgtcggcgtgtggcagcacgaccgcgtcgagatcatcgccaacgaccagggcaaccgcaccacgccctcgtacgtcgccttcaccgactcggagcgtctcatcggcgatgccgccaagaaccaggtcgccatgaaccccatcaacaccgtcttcgatgcgaagcgtcttatcggcagaaggtttgctgatgcccctgtccagagtgacattaagatgtggcccgacaaggttattcctggccctgcagacaagcctatgattgtagtgcagtcaagggtgaggacaagcagttttcagctgaagaaatttctccatggtcctcataagatgcgtgagatcgctgaggcttacctaggagtaactat

SEQ ID NO: 7781 - DNA, 224 bp, Triticum aestivum
  Clone ID: uC-tsrow189025h01b1
ttaattcccaatttttcgtggcctccccgtcgctccgatcctcgccggccggccggcagcccagccccagatccgaacccccgcggcgccccgccattgtcgccgtccccgacctttccccggcagggaatggtgcactgtgggcggcggtaggcagacacgagcacgaccgcgggggcaagaagcggcggcggcgagatggccggcgcggagagggagaggag

SEQ ID NO: 7782 - DNA, 299 bp, Triticum aestivum
  Clone ID: uC-tsrow189025h02b1
tttttctttctttgagcataccattgcatgaagcgactaacaaagagcagctagaagtgttccatgagaagaaagccgcaatggacttggatggaaaagaagtgtctaatgaggaaattgtgagaccaagagtcccactggaggcatgcttagcaagtttttcaggcggagaggaagtgcctgatttttacagcactgcattaaattcaaaaacaacagcaattaagactgctggctttaaaacttttcctgattacctggtgcttcagatgcgtaagtttgtaatggaagcaggatgg

SEQ ID NO: 7783 - DNA, 324 bp, Triticum aestivum
  unsure (1)..(324): unsure at all n locations
  Clone ID: uC-tsrow189025h04b1
tgccgccgccagcagctgcgcaaaggctcgacaaaccctaaccctagtccatagctagcttagcttccttcctctcgatctagctagagccatggcgccgaccaagggcgaggggccggccatcggcatcgacctcggcaccacctactcgtgcgtcggcgtgtggcagcacgaccgcgtcgagatcatcgccaacgaccagggcaaccgcaccacgccctcgtacgtcgccttcaccgactcggagcgcctcatcggcgatgccgccaagaaccaggtcgccatgaaccccataacaccgtcttcgatgcgnagcgtcttatt

SEQ ID NO: 7784 - DNA, 377 bp, Triticum aestivum
  Clone ID: uC-tsrow189025h05b1
tccggttcgggttctggttcggttcgggtccgagagtagctagcctagtctagggtttccgtagttcggagaggagagaaagggagagatccatggcggagacggagtaccgctgcttcgtgggcggcctcgcctgggccaccgacgaccacaacctccagcaggccttcagccagtacggcgagatcctcgacgccaagatcatcaacgaccgcgagacgggcaggtcccgtggcttcggcttcgtcacgttcggcagcgaggagtcgatgcgccaggccatcgaggagatgaacggcaaggagctcgacgggcgcaacatcaccgtcaacgaggcccagtcccgccggtccggcggtgggggcggcggcggcggc

SEQ ID NO: 7785 - DNA, 349 bp, Triticum aestivum
  Clone ID: uC-tsrow189025h06b1
ttgacattccattactttgtttatcttctcgattttgtcatactcaagtgcatgatagtaattttcccttcatttgatatatcgtgtactttcgtttccttgtttgcagctgttttcagcaattgatcggcataggcattgcacagagcatccgataaaatttatatcagtgaggcaaccaaatgtcgtcaaatttaagataaaaccagggtcagattctggtgcttccgacagccgaggaaaaagaatctcttccttgtttcacccatttttcccgcttgcactgtcgattcagcagacaaatatgcagccaactgttgtcaatgtacatttcaggagatagaaatat

SEQ ID NO: 7786 - DNA, 317 bp, Triticum aestivum
  Clone ID: uC-tsrow189025h07b1
ttccagctccgctgcctgattagccggccggccccggccccgtctccgtccccatggcgtccaagcggatcctcaaggagctcaaggacctgcagagggatccccccacctcctgcagcgccggccctgtggcagaagatatgttccactggcaagcaacgatcatgggcccatcggaaagcccatatgctggtggtgtatttttggttactattcacttccccccagactacccattcaaaccaccgaaggttgcatttaaaacaaaggttttccacccaaatatcaacagcaatgggagcatctgccttgatatc

SEQ ID NO: 7787 - DNA, 271 bp, Triticum aestivum
  Clone ID: uC-tsrow189025h09b1
tcgttcagatcccccacgcaggcgagcgaacgcgcgcgcaggcccagatccgccgccccgccggagcagccatggccaaggaggccggcggcgagggggccatgtcggagtcggtgctccgcaaggtgctcgtctcctactgctacgtcgcggtgtggatcttcctctccttcaccgtcatcgtctacaacaagtacatcctcgaccccaagatgtacaactggcccttccccatctcgctcaccatggtgcacatggccttctgctcctc

SEQ ID NO: 7788 - DNA, 368 bp, Triticum aestivum
  unsure (1)..(368): unsure at all n locations
  Clone ID: uC-tsrow189025h10b1
tctatcatcatcgccaagaacatccccaagaagaagccccacgccccgccccccgacaagtacaccgacgccctccacaaggccctcctcttcttcaacgcccagaaatccggcaagcttcctaagaacaacggcatcccgtggcgcgggaactcgggcatgaaggacggcgcggacctgccggacgtgaagggcgggctcgtcggcgggtactacgacgccggcgacaacatcaagttccacttcccgatggccttctccatgacgctgctgagctggtcggtggtgggagtacgccgacaggtacaaggcgatcgnggagtacgaccacgtgagggagctcatcaagtggggaaccgactacctgc

SEQ ID NO: 7789 - DNA, 304 bp, Triticum aestivum
  Clone ID: uC-tsrow189025h11b1
tcttccacgcgtccgcccacgcgtccggcaagttatcttcagttcctgtgtcagtcagtctgagtcgtcgtgtgtgtcgttgagtcctgtggtgtttttgatcgcgagctcgagtgtcgctctgtccggggttaattagagctggttacgcgaggaagaaacaacatgtgttatctttcagtcttggtcggtcggtcgtcggtgatgcagcaatcccttctgtcatggattgggatgtgatgttggaatatcctatgtttgaactcggtttaaatggaagaaaatgcaagtcgtcatagctgcg

SEQ ID NO: 7790 - DNA, 407 bp, Triticum aestivum
  unsure (1)..(407): unsure at all n locations
  Clone ID: uC-tsrow189025h12b1
taatcaagatgcagaggatccacataaagctacaatgtcatatggttctgaacatgaagaggatccacataaagctacaatgtcatatggatctgaaaatgaagaggatccacataaagctacaatgtcatatggatccgaacatgaagaggatccacataaagctacaatgtcatatgtattagaacatgaagaggatccacataaagctacaatgtcatacgggtcagaacatgaagaggatccacataaagccaccatgttatatgagtcaggacatgaaatggatctaaagacatttttaacaggacatgcgacacatttaaaaggaatgnggagtcaccatgctcactctcacaagcacgggaacaaaaagcagcaagacgttttcttcttcacgacatgtt

SEQ ID NO: 7791 - DNA, 372 bp, Triticum aestivum
  Clone ID: uC-tsrow189026a01b1
gttgcaactcgtcgacgcagagcggaggagcgaaggaggccggccggcgagatcgacgcaaatgcagatggactcctactacttccacgacgacgcccacttcttcgccggctgcggcgtccccggctcgccggacctgcccttcgccgacctcattgcgtcgctgtcggagccgctgcctgaggtggcgagccagagcgcgttccgggagtaccgcggcgtcgggctggagcttccggggacggcgcggggagggacggggaacgggatcaacatccaccggaggatgatgggcgtgctgggaggaatggtgccggtcaccgaggaggaagagagaccgcagcaacagcaccagcagcagcagcagcaggc

SEQ ID NO: 7792 - DNA, 312 bp, Triticum aestivum
  Clone ID: uC-tsrow189026a04b1
ttttctacggacgaaatacgttgaaatgagggcggtgcaaaaaaggaaaatatgtggtttttcaacacatgatactattcatcccaaaagtccatgactttgtccttttgcacagatcgcatctcaagattagaaggaaatcccctatgttcaaaagtcaatgatacatactgttcaaataagaaaaagaacaccacatctactgtgctcatcgccgtgatagttcctgtggtactgatatccctcctagtagttatgtgcataatctggaagttatgctggaaaggagagccaagagtccatgaagattat

SEQ ID NO: 7793 - DNA, 334 bp, Triticum aestivum
  Clone ID: uC-tsrow189026a05b1
tctacgcgtccgctcgagggagcgaggctgcgaggggcgacggccgtttctccagagaggaagagctcgagctcgagctcgacctcctgtcccttccggcagtagggggaaagcagaaaatggacgcggcaggtacctccaagagaggtcgtcgtcctcctaccaagccacagaagctcaagttcaagccgaaagtgccgtcgcgcaagccaaagaaaccacctgcacaaaagccacaactggaagagacataaccaattgatgaagagttaatgaagacactgaggacgggacgaggagatgcaaaaactttgcgagttataaaagatgagca

SEQ ID NO: 7794 - DNA, 143 bp, Triticum aestivum
  Clone ID: uC-tsrow189026a06b1
agtccaccctccacctggtgctccgcctgaggggtggtatgcagatctttgtcaagaccctcaccggcaagatcatcaccttggaggttgagtcattcgacaccattgacaacgtgaaggcaaagatccaggacaaggagggc

SEQ ID NO: 7795 - DNA, 230 bp, Triticum aestivum
  Clone ID: uC-tsrow189026a08b1
tctccatgcggcttgatacaggaggatgtgaggccgcaaccatcgagcgggcacaccctgttggcgtgacagcagtctcctgggctccagcagcagcacttgggtccatggttggctcagatcagctcgtccacaagatcgtgtctggtggctttgactgtgtcgtcaaggtgtgggagtttgtcaatggtggctggaagctggagagcgctctggtctccgacatgcac

SEQ ID NO: 7796 - DNA, 333 bp, Triticum aestivum
  Clone ID: uC-tsrow189026a09b1
ttctccgcttccccccctaaacccccgccgccgaccatggcgtcctcctccgctaaaccctactgctgctcctccctaaaccccgccccttccaacgccatcgccaggcgcgctgccctctccgccctccccgccgccaagccccgccgcttctcccatggcctcgccgccgtcgccgcgaaccctagggcctcccgctccgccgtcctccgccccgtccgcgcgtgcctggcggcgccgcggcggcccggagtacgtcccggaccgaatcgacgaccccaactacgttcgcatcttcgacaccacgctccgcgacggggagcagtccccggg

SEQ ID NO: 7797 - DNA, 197 bp, Triticum aestivum
  Clone ID: uC-tsrow189026a11b1
tgttacgcgtccgggggatcgtgggtctggacgtggtgcccgaggcgcggaatgtgctcatcgggctctacacgcgcaccctcaaggagatcgaggccgtccccaaggacgagggctaccgcaaggccgtcgagtccttcacccgccaccgcctccagatctgccaggaggaggaggactggaagcgcatcgaggac

SEQ ID NO: 7798 - DNA, 191 bp, Triticum aestivum
  Clone ID: uC-tsrow189026a12b1
ttttccacgcgtccggtggaagttcagattgttggtgatgaccttctagtcaccaacccaactagagttgcaaaggcaatccaggagaagtcatgcaatgctcttctgctgaaggttaaccaaattggatccgtcactgagagtatcgaggctgtgaagatgtcaaaacatgctggctggggtgtcatgac

SEQ ID NO: 7799 - DNA, 321 bp, Triticum aestivum
  Clone ID: uC-tsrow189026b01b1
tttacgcgtccggtcatcctcatctactgggccatcttccagccgcaccacatccgcgcgacggtcagctccgccacgctcaccaacctcaccgtggcccccgacaacgccaccgtctcctaccgcctcaccgtcgggctcgagctctacaaccccagcctccgcgtccccatctactacgacgccctcgacgccgagctccgcgccagcggcggggccttcctcggcggccccgctgcccgcgtcgcctcgtcgccggcggagttcctgcagcgcaagaagagcgccgacacggtcaggctgggagttcgacgggagcag

SEQ ID NO: 7800 - DNA, 194 bp, Triticum aestivum
  Clone ID: uC-tsrow189026b02b1
tttcgcgtccggctccgcccggccgcccgactttgaccgcctcctcgtctccgctcccacgcccgcgggagagaggcgaccggcggcggcgcgcgaggaggggcctacccacccatcccaccaccccgccggcgaagatgttcggccgcgcccccaagaagagcgacaacaccaagtactacgaggtgctcggg

SEQ ID NO: 7801 - DNA, 115 bp, Triticum aestivum
  Clone ID: uC-tsrow189026b03b1
tttttggtggcgtgtttacctggggaagacctggaaaaggcttgcattcacgcctaaatcccctcgtaaatgaatttgaccaaatcaaatcgatctccgctttcaaaaatgttca

SEQ ID NO: 7802 - DNA, 205 bp, Triticum aestivum
  Clone ID: uC-tsrow189026b04b1
gtttccctcctgcacctggcctggagctcgccccgtttctcctccccacaccacactagcctctccccggtttttccccaaatccgacggactcgaggccaagcggaggcggagatggcgctgcggtgggcgctgctcagatcggcggagatctctcccggtcgcaaggctgcacttgagtacttgcattctctatcaaaggcac

SEQ ID NO: 7803 - DNA, 201 bp, Triticum aestivum
  Clone ID: uC-tsrow189026b05b1
ttttacgcgtccgctgataccaaagctcatcttcttctccttgaaatctttttgggtccacagatttggaggatgtcttgcaactgcggatcaggctgcagctgcggctcagactgcaagtgcgggaagatgtaccctgatctgacggagcagggcagcgccgccgccgaggtcgccgccgtggtcgtcctcggcgtggcg

SEQ ID NO: 7804 - DNA, 359 bp, Triticum aestivum
  Clone ID: uC-tsrow189026b06b1
agaggaagaagaagaagcagtgtggagcacgctgctgctacctggtcatgctctcagcagtgtgaatctccagaagcatgcttgccgtgccttcttccgggtgcaccggaggctggcatgtgagcaggggtgcttcagtgacgcagaagaaaaaaggcaagtcttatcggcaagggaaggctacgcctttcttccaggtctccctctctccatctaaatctgtgtttggaggagggggctacggttagttcacccaccggtttactgtgtccttgggagttgtgatcattatcatgcactcgtcagttgcttgacatgtatggtgtccgttcttgaattttcagctacatataatggtc

SEQ ID NO: 7805 - DNA, 290 bp, Triticum aestivum
  Clone ID: uC-tsrow189026b07b1
ttctatgctaacgacaagcacggagaaagagaaacagtcgcaaaaccccacgcacgcacatggagatggaggctccggcggaccaagctagcggcaagcacatcgttctggtgcacggcgcatgcgtcggcggctgggcctggttcaaggtggcgacgcggctcagggacgccgggcaccgcgtcagtgcgcctgacctcgcggcgtcgggcgtggaccccaggccgctgcgcgaggtgtccgacgttccgcgactacaccaagccgctgctggacctcctggagtgcct

SEQ ID NO: 7806 - DNA, 347 bp, Triticum aestivum
  Clone ID: uC-tsrow189026b09b1
tctttggccgtcggtgaccgtggcgacaccggggtcgcgccggcgccggcgtcgccgaggatcggctgcatggggcaggtcaagggcacacagagatgctcgagggcacgctgcccggcctcctcgaggggaccggcggcgtcgggcctcccgtgcggcagcctggcggggctgctgatggggctattcggctggcggtcgacggggaaggaagacgcgcgcatactccaaggtccgggacgtggcgagtgacacgtcgtcttcagggagcgcaaggggtagcccgtgcgccgagcccgcttgagctcgacccaccgctggccggtgccggcgccgggtggtgagac

SEQ ID NO: 7807 - DNA, 290 bp, Triticum aestivum
  Clone ID: uC-tsrow189026b10b1
tttgttcgcgtccgtgcgtgtccatggacgaggaggagcccgtcgacgcggacgggcaccggcggtgggtggtgtacagcggcagcctcgacgggtcggtgaaggtgtggcgcgtgtccgacgcgccgggcgcgatgacgacgcggacgccggcccacgtgtggaagggcacgccgtcgccgctgggcgcgtggacgccgtaccgggcgccggagcggcgctgaagcgcccgtctgcgcgtgcaatgtagagcacgcacgtgtaaaccgtgtggctgtgcgagagcctac

SEQ ID NO: 7808 - DNA, 310 bp, Triticum aestivum
  Clone ID: uC-tsrow189026b11b1
tttttcagtcatcctcaatggcacggattcgcattctatctttgatagctaagctctttggtgcatcaagttgtactgctactgcaattcgtgactcaaaccttctcagcttatttgaggacgagataaaagatagaaaagatatgcttaaaaccctgagtgcactagaggtcctctatgagcttgcggagcaccctcacagcaatatgttcttgttaaagaccagtttgcttcaacacataactgatgtgatcaacgatccctcagctgattctattgtacggtcaagggcatcattgatcagtgggag

SEQ ID NO: 7809 - DNA, 270 bp, Triticum aestivum
  Clone ID: uC-tsrow189026b12b1
atcactttcttcaatgttggcctgatttttaattcgctccagatgtggatcaacagggtcatcatcagtgctctgaagagcagccgcaacggcaccagttctatcttggccatcttctccaagattcaggattttcaaattcttaccactgacgaagttgaagaggttatggtattcattcctttgtatatttctgaagagatgttcttggtcattctttagcttgaccaggagatcaaaatagtgagatgacatactagcaccaccagc

SEQ ID NO: 7810 - DNA, 353 bp, Triticum aestivum
  Clone ID: uC-tsrow189026c01b1
ttatacactcattgaggctcatgtggatgtgaagaccactgacaactacatgctccgcatgttcgccattggcttcaccaagagacgcccaaaccaggtgaagcgcacttgctatgcccaagcaagtcagatcagacagatccgccgcaagatggttgagatcatggtcaaccaagctgcaagctgtgacttaaaggagcttgtgaacaagttcatccctgaggtgattggaaaggagattgagaaggccacctcaggcatcttccccctcagaacgtgtacgtccgcaaggtgaagatcctgaaggcccccaagttcgacctgtggaagctattggaggttcacggtgacta

SEQ ID NO: 7811 - DNA, 345 bp, Triticum aestivum
  Clone ID: uC-tsrow189026c03b1
tttggcggtcgtcaccgacacggcgtacgtcgggttctcggcggccacgggcgtcatcttcacgcgccactacgtcctcggctggagcttcgcgctcaacggcccggcgccgccgctcgacacctcgaagctcccctcgctgccgcggttcggccccaagccacggtccaaggtgctggagatcgtgctcccgatcgccaccgcggccttcgtcctcgcgctggccatcgccttcttatggttcgtgcgcacgcggatcaggtacgcggaggtgcgcgaggactggggagggtggaattcgggccgcaccgcttcgcgtacaaggagctgtacgactgcatgccc

SEQ ID NO: 7812 - DNA, 248 bp, Triticum aestivum
  Clone ID: uC-tsrow189026c04b1
ttcttcccatggcggccaactcctcctccccgtcggccggcggcgacgcgccggccccggcgctgccgccggtgcgcctcgcggcgggccaggcggccacgatccagccctcctccccgcgctacttcttctcctcgctcgccggcaaggacgcctcctcccatcgccgcatcgccatcgccgtcgacctctccgacgagtccgccttcccccgggcccgagggccgtgcagaactacctgcgccccg

SEQ ID NO: 7813 - DNA, 285 bp, Triticum aestivum
  Clone ID: uC-tsrow189026c05b1
ttatctattacgctcctccttctcggccccgagcgcttcaccatctgcgagatgcggatcccggggcttctcgcggcggcggggccgctgctggtgctgcttctcgccgtcgccggtgcggctgcgcaggaggcggcggcagcgggggacgtgcggccggaggagatcgcggcgaacgcgagggcccaggaggaggcggtgctcgcggccgagctggggcagctcagggcgaaggtcgccgcgctagagtcgagcattgcagcacagacactggagctgaatagc

SEQ ID NO: 7814 - DNA, 293 bp, Triticum aestivum
  Clone ID: uC-tsrow189026c06b1
tcttcccacgacgatgatgcaccgtgctacgatcgtcggcgtcgtcgcgcttatcggcgtccttctcgtcggcggcggggttcgagcgcagccgccgcagcggtttgactacccggcggcgagggcgcccacgacctgggccaacacggacgccggcctgccgaccacgtggtctacaccgacggctccgtggcgcgcgtggccctgctgcggcttaacccgggccggctacggcccctcctacgccttcggcttcttctgcaccggccacggcgcggccccgtgcgccgact

SEQ ID NO: 7815 - DNA, 338 bp, Triticum aestivum
  Clone ID: uC-tsrow189026c07b1
gcttatgttaggtggcaagcttttacatgcgttgttgtgcgcatattcttaacctgatagtcaaggatggtttggatgtgttagaagaatcgattgagaaaatccgtgatagtgttgcattctggactagcacacctaagagaatagagaattttcaagaggttgccaagatgctgaaagtagaccaaagtaaaaaattatcccttgatgtgaaaacacgatggaactctacgtactttatgctcagtgttgctttacgctacaagagtgtatttaatcgcttgaggcagcgggaaaagacctttacttgtgctcctagtgatgatgatttgatattt

SEQ ID NO: 7816 - DNA, 352 bp, Triticum aestivum
  Clone ID: uC-tsrow189026c08b1
tgttatgacatattttatcaattgcaagaattctgaaacatgttcctctgaggctcctttaaggtatgcacggatgcgccctctcaacccatcatcagaattcttgcaattgataaaatatgtcagtggttcctatgacagtggagaaggttttgaaaaactgaacaaggaaatatcagattatgagatgtcaaacaactcaggaagctcccgtaggctcttttatttggcattgcctccatctgtctacccttcagtgtgcaaaatgatccgaacatattgcatgagtccaacttctcgcgctggatggactagagtaattgttgagaagccctttggaagggacctggac

SEQ ID NO: 7817 - DNA, 289 bp, Triticum aestivum
  Clone ID: uC-tsrow189026c09b1
tctcctcgcgtccgcccgagttcaagatcgtcctcaccatcatccgcgacgggctcaagaccgacgccagcaagtaccgcaagatgaaggagaggctcgtcggtgtctccgaggagaccaccaccggcgtcaagaggctctaccagatgcaggagtccggcaccctcctcttccccgccatcaacgtcaacgactccgtcaccaagagcaagtttgacaacctttacggttgccgtcactcgctccctgatggtcttatgagggccactgatgttatgatcgccggcaa

SEQ ID NO: 7818 - DNA, 175 bp, Triticum aestivum
  Clone ID: uC-tsrow189026c10b1
ctcctcctcttcgccgctcccgctcccgctcccgccgccgcgccaccgtcgtcagccatggcaccgaagaaggagaaggccccggcggcgtcgtccaagccggccaagtccggcggcggcaagcataagaagaagaagttggagcaagggcaagcataaggagaaggtgaacaac

SEQ ID NO: 7819 - DNA, 241 bp, Triticum aestivum
  Clone ID: uC-tsrow189026c11b1
tttttcactccgccgctgccgccgccgagatgggtcgcgtgatccgcgctcagcgtaagggtgcgggctccgtcttcaagtcccacacccaccaccgcaagggccccgcccgcttcaggtcgctcgacttcggcgagcgcaacgggtacctcaagggcgtcgtcaccgatgtcatccacgacccggggcgtggtgcgccgctggccaaggtgaccttccgccacccgttcaggtacaagca

SEQ ID NO: 7820 - DNA, 205 bp, Triticum aestivum
  Clone ID: uC-tsrow189026c12b1
actacaagctcccagctcccagctcagctagttgactacctgcaaatttggtgacaaggttgctaggtggatgaacagtcactcgaccatggtggtaccgtcggtgttcgccgccttcgacaaggacggcgaccgcaaggtgtccgtgtccgagctgcgctgctgcatggcggcgtccttgggcgaggacatatccgaggaggag

SEQ ID NO: 7821 - DNA, 369 bp, Triticum aestivum
  Clone ID: uC-tsrow189026d01b1
tttgccgtcatgcgccgccggcccaagaccaagatcgtctgcacgctcggcccggcctcccgctccgtcgacatgatcgagaagctgctgcgcgccggcatgtgcgtcgcccgcttcaacttctcccacggctcccacgactaccaccaggagacgctcgacaacctgcacgccgccatggaccgcaccgggatcctctgcgccgtcatgctcgacaccaagggtccagagatccgtactggatttttgaaagatgggaagcctatccagttgaggaagggccaagaaattggtgatctccacagattatagcataaagggggacggccagatgatatcgatgagctataagagctagcagttgatctg

SEQ ID NO: 7822 - DNA, 335 bp, Triticum aestivum
  Clone ID: uC-tsrow189026d02b1
tgtataaggtaaaccgccgctaaaccctagccgccggcgagatcggccgacgcacccagtccagcctcctcttcctcaaccacctcagacatagcattaagacggtatggcttcaccgtttggggccgcctcctcgtgtggcctcaaggctgccgctccttccggattcgcgaccaggaagcagctctccctcgtttcgcccccgttggtctcgctgccccagagggccaggccagggagaaagtgcagtttccgagtgaacgctgcaaaggagctgtatttcaacaaggatgggtcggctatcaagaagctgcaaactggagtcaataagcttg

SEQ ID NO: 7823 - DNA, 243 bp, Triticum aestivum
  Clone ID: uC-tsrow189026d04b1
tttacgcgtccgggcggccccttcaggtccgagcccaactcgccgccggccgccgcggcggcccggccgcgcctctccttcgaccgctccccgagatccgccgacgccaagcccgtcgccgagcgccgggtgcccaagatcggcacgcctcctcccgaccagaagcagctgcggagggagatcgagctgcagtcgcggctcgagtccgcgcacgaggacctcaagaaggccaaggaccagctc

SEQ ID NO: 7824 - DNA, 205 bp, Triticum aestivum
  Clone ID: uC-tsrow189026d05b1
tttattgaatatctcagttgctttccatggcgcgacgcctccactctgctataatcgccaccttcgttctgcttgcggttggacagtgtagcaatgcagtcccgacggaggctgaagtgtactggcgcaccgtcctgcccgattctccgctcccggaccccatcctcaagctcctccatcctgagaccagctctgtgaagaaacc

SEQ ID NO: 7825 - DNA, 205 bp, Triticum aestivum
  Clone ID: uC-tsrow189026d06b1
tgttttgcgtccgcatcgatgacgctgtcggcgaagatgtagtcgcggaattgcagacggccatggagaagcaaggtgtcgacatgcgtgtgtctgcgttgatcaatgacaccgtagggacactggctacgggcagctataacgatgaagatgttgtcatcggcgtgatattaggtaccggctcaaatgccgcatatgtagaaaa

SEQ ID NO: 7826 - DNA, 312 bp, Triticum aestivum
  Clone ID: uC-tsrow189026d07b1
tctgtcccacggccatcattactgaaattaacgagaagattggtgcggctggggtagtcagccaagagtgcaaaacaattgtttctcagtatggacaacagatcctcgacctgttgctagcagagacacagcccaaaaaggtctgctcccaggttggtctgtgcacctttgatgggactcgtggtgttagtgctggaattcggagcgtggtcgatgatgagcctgtgaaatcgaatggccttcataccgatcccatgtgcagtgcctgtgagatggctgttgtgtggatgcagaaccaacttgcacagaaca

SEQ ID NO: 7827 - DNA, 262 bp, Triticum aestivum
  Clone ID: uC-tsrow189026d08b1
tgttctcgtggatcggtctctttgtcggcggcatcgtggtcggcctgatcgccatgtcgctgtatacgacgagcatctttgttgctggcgcggctggcggtgtgctgctggcgttcacgatgcacacgacagtggcctacaagatcaaccagagcgacccgaacgtcgtgctcgtgatcctcgcaattgtgctcggcctgctgtgcggcgtgctcgcactgaagctcgagaagcccgtgctggtcatcgccacgagcttggt

SEQ ID NO: 7828 - DNA, 227 bp, Triticum aestivum
  Clone ID: uC-tsrow189026d09b1
ttttccacgcgtccgaaaagaagaaaagcaaggccaaaaagaagaaagacccccatcagcagacagatcctccatcaatccctgtggatgagcttttcccttcaggagattttcctgagggagaaatccaggaatataaggatgataatttatggagaacaactagtgaagaaaagagggaacaggaacgactacaaaaaccaatgtacaattctgttcgccgagct

SEQ ID NO: 7829 - DNA, 305 bp, Triticum aestivum
  Clone ID: uC-tsrow189026d10b1
tttttcgtccactccaaaccctagcctcctcctcctctcgccgccgccgccgacgccgacgccgccgcagccgccatgtcagggaggaagaagacccgcgagcccaaggaggagaacgtgacgctcggccccgccgtccgcgagggggagcacgtcttcggcgtcgcgcacatcttcgcctccttcaacgacaccttcatccatgtcacggatctgtccgggagggagacgctcgtccgcatcaccggtggcatgaaggtcaaagctggatcgtgatgaatcatccccttatgcagctatgcttg

SEQ ID NO: 7830 - DNA, 172 bp, Triticum aestivum
  Clone ID: uC-tsrow189026d11b1
tttaaaaaaagaccaatacatttatcacaaatattatcatacatagtacccttctataacttacatcatagaagttgtacaagttatgcagttgcaatttttggcaacaacatggcagctctgaaagaattttccatcccacaaaacatcgattcttaagaaaatacaattg

SEQ ID NO: 7831 - DNA, 186 bp, Triticum aestivum
  Clone ID: uC-tsrow189026d12b1
tttttgaattgaagaggtcatagtcacacaggcatctgtccagcgctgcagtgcagttgtggacttccttgacaaagataagcctttcttccctccaacaatcaacaatcccgagcttcacgatttctttgcgaaggtgggcagtgagatggttggccccaacaacgtgagagagaagcagccact

SEQ ID NO: 7832 - DNA, 224 bp, Triticum aestivum
  Clone ID: uC-tsrow189026e01b1
gtccggcccccgcctcgctctcacgctgctcgcgtcactccgagctccccggttcgtcaacgagcccgcccgagaaaaccgcttgagaaatggctgaagaggatgtccagcccattgtgtgcgacaatggcaccggaatggtcaaggcggggttcgccggcgacgacgcgccgagggccgtgttccccagcattgtgggcaggccgcggcacacgggggtgatg

SEQ ID NO: 7833 - DNA, 197 bp, Triticum aestivum
  Clone ID: uC-tsrow189026e04b1
tgtcacgcgtccgcccacgcgtccgcgaagcccaccgaattcctcgcgattcctctcccctcgcctcctcgtcctccccctcctaggggatcgccggagaggaatcgcgacgagggcttcctcctatcagttaaatcaaagccatggagcacaaggagaccggctgccagtctcgggagggccccatcctttgcgtc

SEQ ID NO: 7834 - DNA, 201 bp, Triticum aestivum
  Clone ID: uC-tsrow189026e05b1
tgtctacgcgtccggcgtcctagatggtttgttattgtaaaggaagcagcagcaattccttgttccatgctgtgcctcatcatggcttctttcttctttagcatcgctgcatcatttgggccactaaagcccttcttgcccttgtgattgtgagcaagttcttgatgcttcccagatcccaaatggccatacaactcacac

SEQ ID NO: 7835 - DNA, 206 bp, Triticum aestivum
  Clone ID: uC-tsrow189026e06b1
tgtatacgcgtgggcggacgcgtgggggagtagtgaagatggcagcgacgggagaggggatggcgatcgacaatcaccatgcgataccgaggacagagtatagcagctggagcagtcctggaaacatgcccggaagtggccatgacattgctagcgaagaagccaagccataagcagcctgatatatgcatgcctttgtacgtaga

SEQ ID NO: 7836 - DNA, 260 bp, Triticum aestivum
  Clone ID: uC-tsrow189026e07b1
tttttgacgcgtgggcgagaagctgcggatctcgatcactggagctggtgggttcatagcctcccacattgcaaagcgcctcaagggcgaggggcactacatcatcgcctctgactggaagaagaacgaacacatggaagaggatatgttctgccatgagtttcaccttgctgatctgagggtcatggacaactgcctcaaggtaaccactggggttgaccatgttttcaatctcgcagctgatatgggaggggatgggc

SEQ ID NO: 7837 - DNA, 181 bp, Triticum aestivum
  Clone ID: uC-tsrow189026e08b1
tctttggagtggatgacaaggtgttctccaggttctgcatcatctccatattctgcatcattagtgagcaacttacctagggaggaggtagatactgacagagtgtatgagcagtgaataaaatagaggagtggcctgttcaccggagcaagcgaggaagatagctcagcccgaccaccaa

SEQ ID NO: 7838 - DNA, 175 bp, Triticum aestivum
  Clone ID: uC-tsrow189026e09b1
ttctcacgcgtccgcggtcatagacatagagtgatacaaggtttttgttttctttgtacgtaaccttgcacttatcgccatgaagatcaccatgctctcgtccaggcccgtcaagcccgattacggcgcttgcggtgcacctccgggcagcacggacgacgtcgtcccgctcacc

SEQ ID NO: 7839 - DNA, 198 bp, Triticum aestivum
  Clone ID: uC-tsrow189026e10b1
tttttgacgcgtgggcttcttcttcgttctcttcagatccccggaagcgccagacccggagcaactgagcagcaagttctcgggcatggacgacgacggcgactggatcgcggcgaggtacctcctctcctccatcctcggccggaacccgctcgtggtcgaccacgtcgacgaggagtccttcccggtcgaccacgc

SEQ ID NO: 7840 - DNA, 183 bp, Triticum aestivum
  Clone ID: uC-tsrow189026e11b1
tctttcacgcgtccgcccacgcgtccgaatccagccccctccgatcgaagcgaagtcaaggctctttcgtcctgctcctcaagatgcagatctttgtgaagaccctcaccggcaagaccatcaccctcgaggttgagtcctcggacaccatcgacaacgtcaaggctaagatccaggacaagg

SEQ ID NO: 7841 - DNA, 191 bp, Triticum aestivum
  Clone ID: uC-tsrow189026e12b1
tttttacggctccctggctccccggaggtacaggtactcggagcttaagaagataaccagcaatttcaagcacaagctcggcgaaggcggctacggcgcagtgttcctgggcactctgggtgatcggcgggcggtcgctgtcaagttcctgcaccactccaggcccaacggcgaggatttcctcaacgagg

SEQ ID NO: 7842 - DNA, 258 bp, Triticum aestivum
  Clone ID: uC-tsrow189026f01b1
tgttgtagagtgcctctggctctgaagactcagcttcacgttcggctttgtgcaactgggcaacatcgatcgtcaactgccacaaccacatcccaagcagcaaggtgatagtctcgttcctcaactcgcgcaaatctcctcacctggtgacgagcatccaccaagtcggcaggctcttcagcacattttatattgatcatggcggttagatatattgatattttattccctcccttcaatgtaccatagctaacctgt

SEQ ID NO: 7843 - DNA, 276 bp, Triticum aestivum
  Clone ID: uC-tsrow189026f02b1
tttcgctcccaggaacggaaccaacaaatccccaccaatctcgtctccaatcgacccgaggctcgtcgaatcctccttccccaccgcctcaagatgcagatctttgtgaagacactgacgggcaagaccatcacccttgaggtggagtcgtctgacaccatcgacaatgtcaaggccaagatccaggacaaggagggcattcctccagaccagcagcgtctcatcttcgctgggaagcagctggaggatggccgtaccctcgctgactacaacatc

SEQ ID NO: 7844 - DNA, 248 bp, Triticum aestivum
  Clone ID: uC-tsrow189026f04b1
ttcacccccacccgccgccatgagggagtgcatctcgatccacatcggccaggccggcatccaggtcgggaacgcgtgctgggagctctattgcctcgagcatggcattcagcctgatggccagatgcccggtgacaagaccgttgggggaggtgatgatgctttcaacaccttcttcagcgagactggtgctgggaagcacgtcccccgtgctgtcttcgtagatctcgagcccactgtgattgatg

SEQ ID NO: 7845 - DNA, 197 bp, Triticum aestivum
  Clone ID: uC-tsrow189026f05b1
tatgttctctccacagcccccgttgagagtcgcctccagagttcggtcgccgcccctctccttccttcccaccggaggctctgccggccggcgtggggatggatcaggtggttggcttctcctgtatatagtagtggtaggtttagtgtttggtttccccctgtgggtgtctggccatgtgccgtatcggagcgtgc

SEQ ID NO: 7846 - DNA, 287 bp, Triticum aestivum
  Clone ID: uC-tsrow189026f06b1
tttttgaggagcacggaggagctatgtatatattaagtctaagttgagtcttgcccctgtggcgtctggcgctatgccgaggtggagcgtaccgccgccgcgttcgagcagcggccggtggttagcggtggctgcagtcctggctgcgctggtgtgccagttgcttgtgaggagtgggttgccggcgactccacgaataaagctcgtttggtccgttgatctggaggaggtccttattttcctctgcttccaaggttaccatggtggtgaaggaggaagagaggaaa

SEQ ID NO: 7847 - DNA, 222 bp, Triticum aestivum
  Clone ID: uC-tsrow189026f07b1
tctctctgataccaaagctcatcttcttctccttgaaatctttttgggtccacagatttggaggatgtcttgcaactgcggatcaggctgcagctgcggctcagactgcaagtgcgggaagatgtaccctgatctgacggagcagggcagcgccgccgccgaggtcgccgccgtggtcgtcctcggcgtggcgcctgagaacaaggcgggacagttcgaggt

SEQ ID NO: 7848 - DNA, 218 bp, Triticum aestivum
  Clone ID: uC-tsrow189026f09b1
ttcttccaccatggcccgcctcgccaccctcgccatgctcctcctgtccctcctgtccgtcgcaagctgccgcgaccttgaggccatctccgacgaccagggcccacccgtccccgtcctcctcactcgagctgatcaagcggatgctgctgctgaggcgacgacccttccgagcttcccggccccggtcgtcgcatgggacgaggacgagctcccat

SEQ ID NO: 7849 - DNA, 341 bp, Triticum aestivum
  Clone ID: uC-tsrow189026f10b1
tttttctggaggaagccggcgtcgagtacgagctcgtccccatcaacttcggcaccggcgagcacaagggccccgaccacctcgccaggaacccctttggccaggtgccagctttgcaggatggtgacttgtacgtcttcgaatcacgtgctatttgcaagtatgcgtgccgcaagagcaagccagagctgttgaaggagggcgacatcaaggagtcagctatggtggatgtgtggctcgaggtggaggcccatcagtacaccgtcgcgctgagccccattctcttcgagtgccttatccatcctatgcttgggggagccactgaccagacggtcatcgat

SEQ ID NO: 7850 - DNA, 287 bp, Triticum aestivum
  Clone ID: uC-tsrow189026f11b1
tttttgccatagccagagagacccagcaaccggagcaagctccacaccggtcaagttcttgcaagagaggaaaaagaaatcgaagaggcagagatgggaagaaggagaagcccggctctgccgctgctgctgatctttggcgtcctcgccgtcgtcctcgcggctcttcctcccctcgccgaatccagcagcagccaccaccaccaccacggccatggccaccactcccgcgtccaaagcagagggcacggaggagagggagagcagtcgtcctcggctgcggcggc

SEQ ID NO: 7851 - DNA, 325 bp, Triticum aestivum
  Clone ID: uC-tsrow189026f12b1
ttgtccaccgaattcctcgcgattcctctcccctcgcctcctcgtcctccccctcctaggggatcgccggagaggaatcgcgacgagggcttcctcctatcagttaaatcaaagccatggagcacaaggagaccggctgccagtctcgggagggccccatcctttgcgtcaataattgtggcttcttcggcagcgcggcgaccatgaacatgtgctccaagtgccacaaggagatggcgatgaagcatgagcaggcaaagctggccgcctcctctttcgacagcatcgtcaacggtggcgatgccgcgaaagaacatcttgctgc

SEQ ID NO: 7852 - DNA, 318 bp, Triticum aestivum
  Clone ID: uC-tsrow189026g01b1
tttttatcgtcaaggaagaaacggaaggcatcaaacaaatttgaggatgacacagttaaaggattccggcgtatgagagaccttattggatcaaacaggacgcccagactgcagttaggtgctggatcttattaacatgggtatcatgatttacctgatcttgaaagtgggccaagctttggctatgagttgcctagcacaaatggaataaacaaaaataagcagtctcattcgttgacaaaaaggaaacgctccaatattggtcaagcttatgaaaattcaagaaagaaagataagcgactttctttgtcaaagtta

SEQ ID NO: 7853 - DNA, 228 bp, Triticum aestivum
  Clone ID: uC-tsrow189026g02b1
tttttgcgtccgcccacgcgtccggttcagaaatacatgtgccgccgatttgccatgcccatgcaaatggtacacactcaggcagcccatgatgcatttttccagtctgatagagagccaagttgtagctgttggtcacctttcatgatatggttgtctgagttaagcatttgcaatattgccaactagtaggattgctctttgagaagaccttgcgttgctattctc

SEQ ID NO: 7854 - DNA, 232 bp, Triticum aestivum
  Clone ID: uC-tsrow189026g03b1
tattcacagggggaaagcagctgcaccgtaccgacgtaagtgcgacgatggacgcgccggcccccgacagcatcgccgctgaggagggcgggcagcagcaacagatgcaccaggacgagaaggagcacaggccgatgttcaggagagtcaaggacaggatgaggaagatgaagaacaccatcgccggccacggccacgatcacgatcacgatcacgagcaggacaccggtgg

SEQ ID NO: 7855 - DNA, 362 bp, Triticum aestivum
  unsure (1)..(362): unsure at all n locations
  Clone ID: uC-tsrow189026g05b1
tttttctaacgaggtacactagtgatcaactaattaagctgtcctttgcgtagctggctagctagtgagttagtgaggatcaatggcatcccagctggagtcactcatgaagcgactgtggagctatcttcccccttctcttagcagttccaggagcgaccctccacaaccgattcctgatcccaccggtgatcctccagccgctcaagccggggacactcccgccggtcaggagctttcacccgctcttcaaggtgtaaactcaggactcagctacttatctactctcagcacacacgcatacgttacacacctntttttgctaatgatatcccccgaacgctgtgataataatctatggc

SEQ ID NO: 7856 - DNA, 231 bp, Triticum aestivum
  Clone ID: uC-tsrow189026g06b1
tttctacagcagctgcaattgcttatggtcttgacaagaaggctaccagtgtcggtgagaagaatgtgcttatctttgaccttggtggtggcacttttgatgtctctctccttaccattgaggagggtatttttgaggtgaaggccacggctggtgacactcaccttggtggggaggactttgacaaccgtatggtgaaccactttgtccaagagtttaagaggaagcaca

SEQ ID NO: 7857 - DNA, 265 bp, Triticum aestivum
  Clone ID: uC-tsrow189026g07b1
tttttacgcgtccggatatctggagatagcctgaagaacgtatacaagtcattcgtgagcgagtaccccattgtgtcgattgaggacccgtttgaccaggatgactgggtgcactatgctaagatgactgaagaatgtggagtggaagttcagattgttggtgatgaccttctagtcaccaacccaactagagttgcaaaggcaatccaggagaagtcatgcaatgctcttctgctcaaggttaaccaaattggatccgtcactg

SEQ ID NO: 7858 - DNA, 219 bp, Triticum aestivum
  Clone ID: uC-tsrow189026g08b1
tttttcacgcgtccggtctctccctgcatctgtgtatacagctgaaaaatgaaggggaaaacaaactgcaggcccctgcttgctagctagtgatttcccttcccttgtagcttccctcccgtgttcagaaatgggtcaagaacaaaagcaaaaaaaaaaagatcatgtgtaatctatgatgagatggtaatcaggtccaacgctagaccttttctcaaa

SEQ ID NO: 7859 - DNA, 254 bp, Triticum aestivum
  Clone ID: uC-tsrow189026g10b1
tcttggacgcgtgggcggacgcgtgggctccagggttcgtttcccctcggagccgaaaccctagccgccgccgccgaccaccgcgagcaagctcagatgggaggcaagtgcccacaccgcaaggtgaagaagcgccgtctcaactgcaagcaggtgcgccgcggcaagttcctcgtcaaagccgacgacgccgtctacgacgagctcgtcaagctggccgaccagggcaaggattccgagggcaaggcgctacc

SEQ ID NO: 7860 - DNA, 310 bp, Triticum aestivum
  Clone ID: uC-tsrow189026g11b1
tttttaggaggctaaggcgcttggcgttgataccgtccccgtacttgtcggaccagtctcatacttgttactctcaaaggccgccaagggcgtagagaaatcattctctcccctttcccttcttagcagcatccttcccgtctacaaggaggttattgctgagttgaaggcagctggcgcttcatggattcagtttgatgagcccacccttgttaaggaccttgaatcccaccaattgtctgcattctctgcagcttacgcagaacttgagtccgcactttctggattgaacgttcttgttgagacctac

SEQ ID NO: 7861 - DNA, 160 bp, Triticum aestivum
  Clone ID: uC-tsrow189026g12b1
ttttgccaatcactcgagcaaaatgaatcccatagccaaatgttacctgatgttcttcctccttttggcagttctcttgcccgaggcgcgcgcgaattcgtgccaccccggcgacctccgtgcgctgctggactttgccgggagcctcaatggtcgggat

SEQ ID NO: 7862 - DNA, 251 bp, Triticum aestivum
  Clone ID: uC-tsrow189026h01b1
gatcaaacaccgacatacacgccgaactggattctctccagcctgaaaatctcacaaggttttacaattctccttggaactaatttggtagctgtgtttcaaagtgacgaactaagtttggtgtatacgccgcagcgatcgagacctaagctgtaatgagttacccagaacagggtctatgagtaaattttccatatgcccagcccataccctactctgatcagcaggagctcaaacaccatgtgcaggat

SEQ ID NO: 7863 - DNA, 326 bp, Triticum aestivum
  unsure (1)..(326): unsure at all n locations
  Clone ID: uC-tsrow189026h02b1
ttttccgcgcggcaccgtcgtgtcggccacgaggagccccggtttgggcaatgcagggaacctgcgcgagggttcgaacttggctaagaactgggatttgagcagacaaattggtgatgagcacggtgttcttatagaatgcagggatgtgcacaagtcctttggggacaagcatgtactgcanggcgtcagcttcaagattagacatggtgaagctgttggaataatcggtccttcgggaactggcaaatcaactattttgaaggttatggcgggccttctagcccctgatagggcgagggtgttcatctgcggaaagaaaagac

SEQ ID NO: 7864 - DNA, 305 bp, Triticum aestivum
  Clone ID: uC-tsrow189026h03b1
ctgtcgcgtgggcaaatttgacagccagtaccacttttcatgccaattcacagctgacctgattgccatgaaccacactgatttcatcattaccagcacattccaggaaatcgctggaagcaaggatagcgtgggccaatatgagtctcacattgctttcacccttcctgatctgtaccgggttgtccatgggattgatgtgtttgatcctaagttcaacatcgtctctcctggagcagacatgactgtctacttcccatacaccgagactgacaagaggctcactgccttccactctgaaattg

SEQ ID NO: 7865 - DNA, 345 bp, Triticum aestivum
  Clone ID: uC-tsrow189026h04b1
tgtcatcgcgtccggccgacgtgtaccgagccgcgccgggccggaagcaaatacggagcatccccggggacttcaccggaaaagtggacagcagcactccgcggagcgccgggcgagatggggttcatcggcgaccaggtggagtcgatccgctcgatgcaggtccgccaggtgctcgcgcagatcatcagcctcggtatgattgttacgtcggcattgatcatatggaaggggttgattggttgcgactgggagttgagtccccggtggtccgtggttctttctggtagcatggagcctggattaaaaggggtgatatcctgtttttgcgcatgagcaaagaac

SEQ ID NO: 7866 - DNA, 265 bp, Triticum aestivum
  Clone ID: uC-tsrow189026h05b1
ttatgcgcccggatctcagcagcgagaacgagcagctcaggaaggacaaccacgcgctggcagcggagctggccctggcgcggcggcactgcgaggagctcctgggcttcctctcccgcttcctggacgtccgccagcttgacctgcgtctgctgatggacgaagacatgcaaggcgctgccggcggcgcacgctcggcggaccaagagcactgccgtagcagcacccgcagcagccgttcgcggagatcgccgaccaggccgtc

SEQ ID NO: 7867 - DNA, 292 bp, Triticum aestivum
  Clone ID: uC-tsrow189026h06b1
tttttaggttcggcgacctcagccccagggaggtcatccagcagttcaccgggctcaacaccaccagcttgaatgccacgtcacccacctacctcccctaccactccttcaagccctgctgcgttgactggcgctccagtggcgctgtcaccggcgtcaagaatcaaggcacttgtggatcgtgctgggcattcgcggcggtggcggccatcgaaggcatgaacaagattaggacaggtgagctggtgtcgctgtccgagcaggaactcgtggactgcgacaccgggagcag

SEQ ID NO: 7868 - DNA, 296 bp, Triticum aestivum
  Clone ID: uC-tsrow189026h08b1
ataatcatcctcgacaccaaagctcatcttcttctccttgaaatctttttgggttcatcagatttggaggatgtcttgcaactgtggatccggttgcagctgcggctcagactgcaagtgcgggaaggtgtaccctgatctgacggagcagggcagtgccgccgcccaggtcgccgtcgtggacgtcctcggcgtggcgcctgagaacaaggcaggtcagttcgaggtggccgccggccagtccggcgagggctgcatctgcggcgacaactgcaagtgcaacccctgcaactgtt

SEQ ID NO: 7869 - DNA, 284 bp, Triticum aestivum
  Clone ID: uC-tsrow189026h09b1
tcttctctcccgactcctctgctcccctgctccgtcgtccaagtacgatcgcctcctgctcctcgcagctcgctctccggccatggccttccagtcccccgtcggctcccccttcgactgcctcctcatagacctcgacgacacgctgtacccgggcaacaccggcattggccccgccctgaggcgcaacatcgacgagttcctcgtggcccggttcggcctcgccgccgacaaggccgacgcgctccgcgccgacctcttccgctcccacggcagcaccctcg

SEQ ID NO: 7870 - DNA, 364 bp, Triticum aestivum
  Clone ID: uC-tsrow189026h10b1
atgtgtgacaacctgctttggggtggttctcttattgaatatgcgcgtgttgagcaatggatggactttggtgccacagaggttgatcccaatatcgcaaggtggctgtacccaaggcttggttatatgccttacaatgcccagtctgaggaattcggcattgctggattgaagagggcccttgaagcattgaacacacacctggcatcaaacacattccttgttgggcattctgtcactctggctgatattgtcatgacatgcaacctctaccatggttttgctcggatcttgaccaagactttcacatctgagtttcctcatgttgagaggtacttctggatcatggttaaccagcctaact

SEQ ID NO: 7871 - DNA, 293 bp, Triticum aestivum
  Clone ID: uC-tsrow189026h11b1
ggagcttcccattgccatgcttgcatgtgcccgtatcggcgctgtccattcggttgtgtttgctggcttctctgcggattcgctggcccaaaggatcgttgattgcaagcctaagcttgtgctcacttgcaatgccgtgaaaagggggcccaagcccattcttctcaaagatatagtggatgctgctctggtggaaagtgagaagaatggattctctgtaggtatttgtttgacatatgaaaaccagtctgtaatgaagaggcaagacacaaaatggcaagtgggaagaagat

SEQ ID NO: 7872 - DNA, 348 bp, Triticum aestivum
  Clone ID: uC-tsrow189026h12b1
tcttggacgcgtgggcggacgcgtgggtccaaagtgtgtatgaagcaactccgggagctggtcttcgagatcgaagactggatcgatcaaaggccggagaccaacattctgttggacacagaagaaatcaaatacttcatgtctgagatcaagggagcgcgtgagcgcttcaaatggtaccgaagtcttctcaagatagagtccagtgagaccgatcttgctgttgttgcacccagcaaaatcaccattgaccctcgtctgcttagcgaggagaaatattgtcatggtattcttgatggtccaagggatgagcttgtcaagcatctgacagatcagacggaggagatg

SEQ ID NO: 7873 - DNA, 164 bp, Triticum aestivum
  Clone ID: uC-tsrow189027a01b1
tcgatcaatcagagaaaatcatccctccatatctgtccagctcttgttcctgctcctcctcctcgtcagctcccgagttcttcctgagcgaagcaagccaaggcaagctaggtagcagatccaagaaggagaagcgatgtcggacgtgacggcggtgatggatc

SEQ ID NO: 7874 - DNA, 320 bp, Triticum aestivum
  Clone ID: uC-tsrow189027a02b1
tgattgaaaacactcgacgatctggctctgtctcaggtatatgctccctcgcccgcaagatccgctctctcccatctacgcatcgcaacagcacttcagctcctcttgtggattctcaccagatcaggccacctcactcaccttcagtctgtcgtgatggacaaagttaagatcccaacaaaaagtgcttcttgatgctatgatgcagcaacttaaccttccaaattacagtttactaaacagacctggccggcagatccctcagctatcagggaaggcagacatcagcggagattgagggcgcctctccggcgagagtg

SEQ ID NO: 7875 - DNA, 285 bp, Triticum aestivum
  Clone ID: uC-tsrow189027a03b1
gccgtcgccgccactccgccgctgccgccgccgagatgggtcgcgtgatccgcgctcagcgtaagggtgcgggctccgtcttcaagtcccacacccaccaccgcaagggccccgcccgcttcaggtcgctcgacttcggcgagcgcaacgggtacctcaagggcgtcgtcaccgatgtcatccacgacccggggcgtggtgcgccgctggccaaggtgaccttccgtcacccgttcaggtacaagcaccagaaggagctcttcgtcgccgcgagggtatgtacac

SEQ ID NO: 7876 - DNA, 317 bp, Triticum aestivum
  Clone ID: uC-tsrow189027a04b1
tcccagacggaggacatcaacgcgggcgtgttcgccaccgacgacttccgcatgtacagcttcaaggtgaacccgtgctcccgcgcctacacgcacgactggaccgagtgccccttcgcccacccgggggagaacgcccgccgccgcgacccgcgccgcgtcccatactcctgcgtcccctgcccggacttccgccgcgacccggcagcatgccgcaagggcgacgcctgcgagtacgcgcacggcgtcttcgagtcatggctccacccggcgcagtaccgcaccaggctctgcaaggacgaggtcggctgcccccg

SEQ ID NO: 7877 - DNA, 391 bp, Triticum aestivum
  Clone ID: uC-tsrow189027a06b1
ttgtctttctccaatcgcatccgcaaaaccaacactcgtcttccttcctccctcgaccagcgcaggcggatctcatcccatccaaggcaggcaggcaggtacgagatggctctcaccagaattggtcttgctggcctcgccgtcatggggcagaacctcgccctcaacattgcggagaaagggttccccatctctgtctacaacaggaccacctccaaggtcgatgagactgttcagcgcgccaagctagaaggaaacctttctctctacggattacatgaccctgcatccttcgtcaactccattcagaagccacgtgtagtcatcatgcttgtcaaggccggtgccccggttgaccagaccattgcaacgctcgcagcacacctggagc

SEQ ID NO: 7878 - DNA, 128 bp, Triticum aestivum
  Clone ID: uC-tsrow189027a07b1
ctcaccagcttaattaccttgactgacattgttaggtcttgtgtcagtgaagctagctaggtcagaaaaaccatggcggcttcccgtgcctagactgcactgcttgctgtggtggtactcatggtctg

SEQ ID NO: 7879 - DNA, 471 bp, Triticum aestivum
  Clone ID: uC-tsrow189027a08b1
tcccacgcgtccggcgccagttccttcaccacgaggtcctttatcgaaacaattgtctttcaacaattcgaagagcgaaccaaaggtcaagcagttagcagaaggtgtggcaagcaagctgaagcctgtaaaacattccccaatagatgttagagaaaaggggccaatgagaaagcttatgaagtcagagtcattcaagcgcgagggttcagttagtaaagactccagttcattaaaacagaataaatcatctctcttgtctcgagatgaaaaaccaagaatgttgaagctgatgagtgataagagttttttagaaagaaggccttcttttattcttcagaaaccacctttatcaccaaggcctgatagttctgtcaagtcgggagatagaaaagtcgaccaagataatccaaggcctggaccaagcatactaaatactagcaaaaagccaggtaacatcgaaaagaagca

SEQ ID NO: 7880 - DNA, 450 bp, Triticum aestivum
  Clone ID: uC-tsrow189027a09b1
tggcatcaccgcgcgccacccggccaaggtcttctcccgcatgcgcgacctcctcgccaagccccttcccctacgcgcgggccctcgccgactcgctcttgctcccctacgacctcgtgcaggacgcgcgcggcgccgccgcggtgcgcgccgacgacggccaggtctacaccgtcgaggagatcgtggccatggtgctccactacgcctacgggatcgccgacgcccacgtctgcctgcccgtggtggacgctcgtcgtcgccgtgccgccctacttcggccaggccgagcgccgggccctcacgcaggcggcccaggtcgccggcttcaacgtgctcgcgctcgtcaacgagcacgccggcgccgcgctgcagtacgggatcgacaaggacttctcaacgagtcgcgccatgtcatcttttacgacatgggctcaggcagcacctacg

SEQ ID NO: 7881 - DNA, 378 bp, Triticum aestivum
  Clone ID: uC-tsrow189027a10b1
ttccacgcgtccggtacactctcctccagaaggacgtgaactggcctcttggctggcccattggtggctaccctggtccgcagggaccatactactgcgccgccggcgcggacaaggcgttcgggcgtgacatcgtggacgcccactacaaggcctgcctctacgccgggatcaacatcagcggcatcaacggggaggtcatgcccggccagtgggagttccaagttgggccgtccgtcgggatcgcggcgtccgaccagctgtgggtggcgcgctacatcctcgagaggatcactgaggttgccggggtggtgctgtccctggacccgaagccgatcccgggcgactggaacggcgcgggcgcgcacaccaactaca

SEQ ID NO: 7882 - DNA, 424 bp, Triticum aestivum
  Clone ID: uC-tsrow189027a11b1
atcggattgaattagtggtgcagatgataaaggagatgagagctaatcgctttgagtctgatctggcaacaagcaccatgctgatacatttgctttgtcgaagccatcggtttgaggaagcatgtgctgagtttgaggacatgttccgtagaggccacgtgccccagtatatcacttacaggatgcttatgaaagagctcaagcggctgggtttggttcaactggaagagaagttgaccgacctaatgcgctcagtaccacattctacaaagttgcctggcagctacagagaaaaggaaggcgacaatgctaaagaaaagagaaagttaatattggagaaagctcaggctgtttccaatgttctgaaggagtgtaaagatccgaaggagttgcacaagctgaaagatgatgaagaaactgatgt

SEQ ID NO: 7883 - DNA, 257 bp, Triticum aestivum
  Clone ID: uC-tsrow189027a12b1
tccacgcgtccgcggacgcgtgggcagccacagagtcacacaagcactagcttcagctagccagcctcagccactccgggcattttcttgcatccacgacggcaatggccaccgctgatgtccagaacccgactgccgcgctgacggaggaggcgcccgcagaggagacgccggtggccgtcgaggaggcccctacgacagaggaggtccccgcgccggcggaagccgaggtcgaggcgtctgcccccgtcgaggtt

SEQ ID NO: 7884 - DNA, 311 bp, Triticum aestivum
  Clone ID: uC-tsrow189027b01b1
tgccttcattgccccttatggtatggctacggagggcgcctcaagttcctggagagattcgcttacatcaacaccaccatttacccactaacctctctcccgcttctagtctattgtatattgcctgctatctgtctgctcactggaaagttcatcatgccagagattagcaacttggccagtatctggttcattgcgctcttcctttcaattttcgccactggtatccttgagatgaggtgagctgctgttggcattgacgagtggtggaggaatgaacagttctgggtcattggaggtatctctgcaca

SEQ ID NO: 7885 - DNA, 235 bp, Triticum aestivum
  Clone ID: uC-tsrow189027b02b1
ttccacgcgtccggtttgctgaaaaagtatctttgaggttgaacagggacatatgccggatggccaaataattaccgtgaagaaactcgcggaaaattcgccaatcgcacgcgacaaagcgtttgctaacgaggttcagaacattatggctctccaccatgaaaatgtactgaagttggtcggctactgtcacgaaggtcaaaagaaagtggtgctgaacaacggaagatatatt

SEQ ID NO: 7886 - DNA, 407 bp, Triticum aestivum
  unsure (1)..(407): unsure at all n locations
  Clone ID: uC-tsrow189027b03b1
tcagtatacctttttttataggctttgcaagtcgaagacactagagaacttcaaaaatatcatattgttatcgtcaccacaggatgggtatgtaccatatcattcagcaagaatcgagctctgcccagctgcgtcggctgataattcaaggaaaggtcaagtcttcacagaaatgctgaataattgcttggatcagatgcgtgcaccgtcgtctgaaactcgtatattcatgaggtgtgatgttaatttcgaccaatctgcccatggacggaacctgaacaccatgatcggcagagcagcccacatagaattcctggagactgacatctacgccaggttcattcatgtggtccttccctgaacttttncgatgacgatgacaatgttctctccctcttatttgggat

SEQ ID NO: 7887 - DNA, 260 bp, Triticum aestivum
  Clone ID: uC-tsrow189027b04b1
tttcctcccctgtttgtttcttgaacccaaacccagcttgtgccccggtcaaaatcggactttgggatcgccatgggcggggattcgaggttctcccactgacgcggctggtccggtcggtcagcgacagcgcacgccatggccgaggaccatggatcgtcgcggcacatgtcgtccatgtccatgtcgcacaaggagctgggcgacgacgacgcgcgggtggtgcatgtgggcgacgcggagcgcaccaacgagcgcct

SEQ ID NO: 7888 - DNA, 252 bp, Triticum aestivum
  Clone ID: uC-tsrow189027b06b1
tcggacgcgtggttccaaggaaggaaggaagaaaatccagagaaactccagagaagaagaagaagaaggtcgacgacgatggcggcgttggtggagctgaccaaggagtacggctacgtggtgctcaccgtggtggcctacgccttcctcaacttctggatgagcttccaggtcggcgccgtccgcaagaagtacaaggtgttctaccccacgctgtacgccatcgagtcggagaacaaggacgccaagcgc

SEQ ID NO: 7889 - DNA, 413 bp, Triticum aestivum
  Clone ID: uC-tsrow189027b07b1
cttatcggtggtagtgctacaagcgagtgacactagttcttgcaccgatcagatccaacttctgcacaggatgctggacaagctgtgggacgacgtggtggccgggcctcgcccggagacgggcctcgacaagctccgtcgggccgccgccacccaacccctcgccatcaacacagctgcaggggaggcgattaagcagtcgccgtcgatgccgactaccccgaccactccggtgacgccgtcgtcgtccacgccgccgcgcggcggcagcgtgtggcggagcgttttccaccccgggagcaacctggccaccaagagcctcggcgccaacctcttcgaccgcccgcagcccaactcccacaccgtctacgactggctttacagcgacgagactaggacaaggagcaaccacc

SEQ ID NO: 7890 - DNA, 486 bp, Triticum aestivum
  Clone ID: uC-tsrow189027b08b1
ttccacgcgtccgcccacgcgtccggttcccaccctctcacatccacaccagcggcaaatagtagtaatccccgccgcccaacccccaccctctccggcgcgtgcgcttccgatgcttccgcgccggcgtcggccacgggtggtgcagtgatggtgggcttcttccgcagcggcaaccttgcctcaagggtgttcgaccggcagtttctctctccgcgccccggcgcaaccgttaatactgtcagacaattctatgagaatttggttccaagttacactatatacggcatagattgcccagactattcgtttcgcaagttcaccgatgatggcaagtatcttgtggcctttagtcgaaaccaccaagatttgattgtgtaccgtcccatctggttaacgttttcatgccatgaagaatgtgattctcatgatcttccggccaatgcagagagatttgacagtttctttaagcagctctactcaatc

SEQ ID NO: 7891 - DNA, 325 bp, Triticum aestivum
  unsure (1)..(325): unsure at all n locations
  Clone ID: uC-tsrow189027b09b1
tataagttcctcatcgacgggtttccaaggaatgaagagaatcgtgctgcgttcgagaatgttacaaaaatttcgcctgcatttgtgctattcttcaattgttccgaggaagagatggaaaggcgtcttttgggacgcaatgagggtagagttgatgacaacatcgagactatcaggaagagattcaaagtttttgttgaatccagtttgcctgtgattgagtactatgacgcgaaggacaaggttaagaagatcgatgctgcaaaaccaattcctgaaggtgtttngaagatgtcaaagccattcttggcccatatgccaaggc

SEQ ID NO: 7892 - DNA, 323 bp, Triticum aestivum
  Clone ID: uC-tsrow189027b11b1
atcagttgatccgtccagcaccagcaagcaaccgggttcaggttcaagtttgatcctctagctttttcggttgcgtccgtcgattcgtctgccatggagggaggaggcgttccttccgcccaggacgtgtgggactgggaggtgctgcctgacgagcacaggagcttctacgccgagaccagggccgcatcccgtgcccacgacggcggcgaggttcttgccgatcacgaaaccgaggaaccgatcctgcctcccccgtcacaagtcgacgctgataatgttgacgagtgcaaggacatcggcgtcgacgtcgacgtcgtgcc

SEQ ID NO: 7893 - DNA, 393 bp, Triticum aestivum
  Clone ID: uC-tsrow189027b12b1
taacttgccagcagcgccagtgtgcagcgatccagtgaccgacacggacaagaacaagatggtcgccggctgtttcatcaccgacgagtgcgccctggcggtgtcgacggagcggatgtggaaggcggtcttctccggcgaggacacggccgtcctgcccaaggcctgcgcgggcttcatcgacgccgtggacgtcgagggcgactgcggacccggcagcgtctccaccatgacgctcagcccggcggcagcggagctcgccggctcgggcgtgatgaggagccgcctggtggcgcgcgacaacgcggcccgtgtgatcaagacggagctgctggagggcagcaaggtgagcgcccagctcaagtcgcaggtggccgaggtgaagctcgaggc

SEQ ID NO: 7894 - DNA, 265 bp, Triticum aestivum
  Clone ID: uC-tsrow189027c01b1
ttccacgcgtccgccgccccctcctccttgacccgccgtcgcttctgccaccccgaaagaaaaacacacacacacagtagagagcttcagcatcccctgagcgcgagagatggcggcgaagggcgacgggccggcgatcggcatcgacctcggcacgacctactcgtgcgtcggcgtgtggcagcacgaccgggtcgagatcatcgccaatgaccagggcaaccgcaccacgccgtcgtacgtcgccttcaccgactcggagcgc

SEQ ID NO: 7895 - DNA, 236 bp, Triticum aestivum
  Clone ID: uC-tsrow189027c02b1
ttcctcgcgtccgcccacgcgtccgctcgacaccaaagctcatcttcttctccttgaaatctttttgggttcatcagatttggaggatgtcttgcaactgtggatccggttgcagctgcggctcagactgcaagtgcgggaaggtgtaccctgatctgacggagcagggcagtgccgccgtccaggtcgccgccgtggtcgtcctcggcgtggcgcctgagaacaaggcaggtcag

SEQ ID NO: 7896 - DNA, 339 bp, Triticum aestivum
  Clone ID: uC-tsrow189027c03b1
ttcctcgcgtccgcacggcgcgctcatcatccttcccaagcgcggcatgccctaccccttccccaagcccgacaaggagttccccgtcgtcctggcggagtggtggaggagggacccgatcgcggtgctcaggcagtccatggtcaccggtgcgccgcccaacgtctctgacaccatcctcatcaacggccagcccggggatttcctcccgtgctccagccaagagacaagtatcattccggtggtcgctggcgagacgaacctggcacgcatcatcaacgcggccatgaactccgagctcttcgtctccctcgccggccacaagatgacgggtggtcg

SEQ ID NO: 7897 - DNA, 247 bp, Triticum aestivum
  Clone ID: uC-tsrow189027c04b1
cccacgcgtccgcggacgcgtgggcctagatctgaacccgtcaggcggcgacccttcctcctccttgccgccctcgccctggtccactccggcggccccttcgccctctttaaaccccagcacctcaatcacgtcttcactccaccgcccgcgaaatccaggccctagcgcgacttcgccatggccgcagcactcctcctcctggtgccgcccgtcggcctcctcgccgagctcgccttcctgaccc

SEQ ID NO: 7898 - DNA, 468 bp, Triticum aestivum
  Clone ID: uC-tsrow189027c05b1
acgcactggaaaagtgatgcgggacttcaagggaagtgctgatgatttcactactggtggaaatatgggtgtctctggtgtgtcatggcctatcttcaggtggggtggtggaagagatgataagtattttgctagacttggaaagaatgttatatctgtctatgagactgatacgttctctcttatcgataagaagtccctaaaggtagaaaatgtggttgacttcagttggtctcctactgatcccatcatatcactctttgtgcctgaattaggtggtggaaaccagcctgccagggtgagtcttgtgcaaattccgggcaaagaggagattcggcagaaaaaccttttcagtgttagcgactgcaaaatgtactggcagaacaatggagaatatctggctgtccaggtagacaggtacaccaaaacatagaagagcatttacactgggttcgagctgttcagaat

SEQ ID NO: 7899 - DNA, 258 bp, Triticum aestivum
  Clone ID: uC-tsrow189027c06b1
agcatgatatgcaagcgtgaacactcatcttggcattgaacaaagtcgaagagatgacttggaatctcttggatatgtacttatgtacttcctacggggaagccttccttggcaaggtctgaaagcaggaacgaagaagcaaaagtatgagaagatcagtgagaaaaaagttgcaacatcaattgaggctctgtgtcgtgggtatcctactgagttcacatcatatttccattattgccgctcgcttcggtttgatga

SEQ ID NO: 7900 - DNA, 412 bp, Triticum aestivum
  Clone ID: uC-tsrow189027c07b1
tcacgcgtccggttcggttcgttagggtttagtagtggggaagaggaggaagaatggcggacgtcgagtaccgctgcttcgtcggcggcctcgcctgggccaccgacgaccagtccctccagaacgccttctccaagtacggcgacgtcatcgactccaagatcatcactgacagggagacgggccgttcccgcgggttcgggttcgtcaccttcgcgtcggacgaggcgatgcgccaggcgatcgaggccatgaacggccaggacctggacggccgcaacatcaccgtcaacgaggcccagtcccgccgctccggcggaggcggcggcggcttcagcggcggaggcggtggcggctacggcggccagcgccgcgagggcggcggcggcggctacggcggcggcggcggtgg

SEQ ID NO: 7901 - DNA, 406 bp, Triticum aestivum
  Clone ID: uC-tsrow189027c08b1
tgccctctctggtttgctactgctggtgctcatcggactccccgacgccgccgtcgccgccaacatgaccgaggtctgcgtcaaggccgccgtcggccaccccgacacgctcggcgactgtcccttctcccagagggtgctgctcacgctggaggagaagaaggtgccctaccagatgaagctcatcgacgtcagcaacaagcccgactggttcctgaagatcaatccggagggcaaggtgcctgtgtataacggtggtgatggcaaatggattgctgattctgatgtgatcactcaagtcattgaggagaagtacccaactccatcacttgtgacccctcctgagtatgcatcagtgggatcaaagatcttctccaccttcgtcacgttcttgaagagcaaggat

SEQ ID NO: 7902 - DNA, 105 bp, Triticum aestivum
  Clone ID: uC-tsrow189027c09b1
tacaacacgtacatcattcagagctagtcgatcggcaatggcaggtcaggccgagaaagtgttcgtccccaccgacgacgagctgctccaggcgcagtccgacct

SEQ ID NO: 7903 - DNA, 423 bp, Triticum aestivum
  Clone ID: uC-tsrow189027c10b1
ccgtctgggagtggtctggttctgcctatgatgaaggaactgaagcagctgaatggttctccgcctatttcgggaaaccaagtcggctcgtgcggtttaaagaagagtccgaaatcaggccgactaatcctgagtatgctcaaggctacaagatcaccttcacggattgcttcccgttcctgatagcatcccagggatcactggatgcactgaatgagctgcttaaggaacctgtaccaatcaatcgcttcagaccaaatattttagtggacggatgccacccgtacgcagaggatctgtggaaaaccatgaagataaacaagctaacatttgacggcgtgaagttatgcgaccgttgcaaggtgcctaccattaatcaagagaacggaatacctggcagcgaaccaacagaaaccatgctga

SEQ ID NO: 7904 - DNA, 245 bp, Triticum aestivum
  Clone ID: uC-tsrow189027c11b1
gcgggtgaacctgctgataccggaggtgaacgccggcggcgtgaacgagatcatcggcgtgatgggcgcgcaggcggacgtggaggtcgtgttcgaggtcccgcccctggagcacgccgacgtcctggagcccaactggctgctggacccgcagagcctgtgcggcgagaagggcgcgtccgtgccgggcagcgtcggcccgttcgggctgctcgtcatggcctccggcgacatgcaggagcaca

SEQ ID NO: 7905 - DNA, 379 bp, Triticum aestivum
  Clone ID: uC-tsrow189027c12b1
cccacgcgtccgcccacgcgtccgggcccgctctcaatgggatttccgattgaaaaccgtgggattcctctgccggcgaacgctctcaggagccacatggatcgtgcaaagcatctcccgttcgtcaagcggatctctgatttccacctgcttctccagatcgctgctttcctggatgtcaaggccgacgtgcctactctggctgcgtgcgtgggacaccaggccgaggtgccagagggctaccggctcctgatcgacgccttggcaggcatacataaccagagagggtttcctgaaacaagacacggggtcatttagcagcttgctctcagtatcatctcatgtgtgatttatacgagttttaaacaagacttacaca

SEQ ID NO: 7906 - DNA, 238 bp, Triticum aestivum
  Clone ID: uC-tsrow189027d01b1
tggcgacggaggaggacacgacgcggctgtgcgacctcccggaggcgtgcgtggcgcacgtgctcgcgctcacctccccgagggacgcgtgccgctgcgccgccgtgtcgccctgcttccgcgacgccgccgagtccgacgtcgtctgggcgcgcttcctcccaccggactaccgcgccatcctccagctgcacgaggcgccggcgcggcgcttccccctctcgcgctccggctccac

SEQ ID NO: 7907 - DNA, 335 bp, Triticum aestivum
  Clone ID: uC-tsrow189027d02b1
tcgttaaggccagccgatagatccccgcaagatgcaggagcattttgaagatttttatgaggatatcttccaggaactgagcaagtttggtgagattgagaccctcaacgtctgtgacaacctttctgatcacatgataggcaatgtgtatgtccagttcagagaggaagatcaggcagcagcagctcatactgcccttcagggacgattttactctggtcgcctaataattgttgacttctctcctgtgacggacttccgtgaagcgacctgcatgcagtatgaggagaacacctgcactcgtggtgggcactgcaatttcatgcatgtgaagc

SEQ ID NO: 7908 - DNA, 249 bp, Triticum aestivum
  Clone ID: uC-tsrow189027d03b1
tggatgaagaactacacgatctatgcagtttccatcaccatccgtattgtgcttggctttatgcttattgccctgatctggaaatttgatttcgctcccttcatggtccttatcattgccatcctcaatgatggtactatcatgacaatatccaaggacagagttaagccatctcccttgcccgacagctggaagctcaatgaaatcttcgccactggtgttgtgctcggaacctaccttgccctgatg

SEQ ID NO: 7909 - DNA, 510 bp, Triticum aestivum
  unsure (1)..(510): unsure at all n locations
  Clone ID: uC-tsrow189027d07b1
tctccgtctccggtcagctcgccagatcctacctccacgcgctagggtttgcgcggccgtccgtccgtccgtcgtcgccaccagccatggcgtccgggaagcacttcaagtacatcgtcctcggcggcggcgtctcgggggggtacgcggcgcgggagttcgccaagcagggcgtgcagccgggggagctcgccatcatctccaaggaggccgtggctccttacgagcgccctgccctcagcaaggcatacctgttccctcagaatcctgcaagattgccaggattccatgtgtgtggggaagtggaggcgagaggctcttgcctgaatggtactcacagaaaggcatcgagcttatcctgagcactgaaattgtcaaagctgatcttgcttccaagactctgactagtgcagctggagcaacctttacatatgataccctgctaatngctactggctcctcagtcattaagctctctgattttggcactcaaggagctgattctaacaa

SEQ ID NO: 7910 - DNA, 337 bp, Triticum aestivum
  Clone ID: uC-tsrow189027d08b1
ttctttccgttcttgcacattgaggagattactttcctcaagcgtgcttgggtttggagcccacatgtacagtcacgtgttgcaaggctggaacacgattcgattgagaaaggtcttttgtaccatattccatcgaaggtggtgtgtgcagagcagcaggctgtggacgtgatgggcaatgcccttcgagagtatttcttctatggaaaaaagaaatatgatgagcgaaaggcggcctttgaacgtgtgattgcacgcaaaggtctgggtgactatttcccaggcttcgtctccttcgagacatgtgtagagacttacaagcaaggaagcgagcaca

SEQ ID NO: 7911 - DNA, 337 bp, Triticum aestivum
  Clone ID: uC-tsrow189027d09b1
cccacgcgtccggggtggttttggttccgtattcaggggaatgctcaaagacggcacactaatcgcagtgaaggttctgtcagccacttcaaggcaaggcgtccgagagttcttgactgaacttacagcaatttcagacatcaagcatgaaaacctcgtcacgcttgtcggctgctgtgctgaagggtcccataggatcctcgtttacaattatcttgagaaaaacagcctttcacagacattgctagggtctggctacagcagcatccagttcaactggagggctcgtgtcaaaattgccgagggagttgcccgtggacttgcatttcttcatgag

SEQ ID NO: 7912 - DNA, 248 bp, Triticum aestivum
  Clone ID: uC-tsrow189027d11b1
ttgtcgcggcacccttcacctcaaaagaaaaaagaaaaaaaagtgctcaccgatgcggctcgtgtccacctgctccgtctagtcgcgacacccgcacagctctggttcgcagtcgcagcgatggcgcccaaccaccgcccccgcgacctgctccttctcgccgcggcgctcctgctctccgcctcctgcgccgccgccgccgacttcgagtactgcaaaaaggggcgccactatccggtgaaggtgag

SEQ ID NO: 7913 - DNA, 252 bp, Triticum aestivum
  Clone ID: uC-tsrow189027d12b1
tcttcctggccatgataccgcgagccgccgcgcccggcgggggcgggtgcaaggtcgcgtacgtctgcaggcagcccaaggacatggtggtctcgcggtggcacttccaccggcggctgcatcccgagctggcgttcgccgacgtcttcggggccgtgtgcagcggcttggtggcgtacggaccagcgaaaacatgttttagagtctatgcatccgggtacttcttattcaaccactcattcctgcatcacg

SEQ ID NO: 7914 - DNA, 267 bp, Triticum aestivum
  Clone ID: uC-tsrow189027e01b1
tgccttgttcccaaagtgctgcgacagctgcaggttcttctcgggggccgtggtctgcgacgactccggccccaagtgccgcgacggctgcgtgaactgccgcgtcgtgcatacgagccctaagaagacgttccgatgcgccgatgcacgcgtcgacgatggcacgccctgcaagccctgcaagaagtactgatcgctcatgtctcagaacatcagatgttgcgccgaaaataaaagctgggatgagttgagcagagccgttatggc

SEQ ID NO: 7915 - DNA, 227 bp, Triticum aestivum
  Clone ID: uC-tsrow189027e02b1
cccttgcgtgcgccacgcgtccgctaacagttgattcctctatttgatcacacgtgtagggctgcgatgcttcggtgctgatcaactcgacgccggggaacacggcggagagggactcgccggcgaacaaccccagcctacgtggcttcgagatcatcgacgaggccaaggccgcactggaggcgttctgcccgcgcaccgtctcctgcgccgacgtgctcgctttc

SEQ ID NO: 7916 - DNA, 270 bp, Triticum aestivum
  Clone ID: uC-tsrow189027e03b1
cttccctccctcctcgatctctctccctcggccgccacgaaccctagctccctttcctacgatcccgtggtcgctgccgctgctccatccgacctccctcatcagccgccgccgacactacggctcctccatccaccgactctgtctgtgcaagcgaccagtttccttccgccccgaccttctccactgtctcccagttcatcatccgtcccttgctgctcgaggtgctcatctgcccatgccgcgaggaagcaacgtgaggagggagag

SEQ ID NO: 7917 - DNA, 223 bp, Triticum aestivum
  Clone ID: uC-tsrow189027e04b1
gcaagcatatagtatatatatatatatatagacaagtaatgccacttcttccgctccagacagatacggatcagatcatgtcgagcattccctgatggaaggcggcgacacggtcgggcgtcacgcactgggtgatgagccgtgcccctggcttgtgcgcccacggcttcaccaggatgcacgtcgcgatgtagtccaggttcgtcaggggcacgacgtgtgc

SEQ ID NO: 7918 - DNA, 233 bp, Triticum aestivum
  Clone ID: uC-tsrow189027e05b1
tacctgctccccctcccacctcctgccgccccaggccccggcggcccctccgccggcgcggcccgacatggcccctccgcccccgcgccccatcatggcccctccgcctccgcctccgctgtcggccatcccgtcccggctccaccgcatccggccgccgccgctggccccgccccgcccggcgaccatcctgccgtcgccggcccagccgactctctcccctctcccggcgc

SEQ ID NO: 7919 - DNA, 346 bp, Triticum aestivum
  Clone ID: uC-tsrow189027e06b1
ttcttttcctccccttccggttcgggttctggttcggttcgggttcggttcgagagagaggccgagtagctagcctagtctagggtttcggtagagaggaagtgagatccatggcggagacggagtaccgctgcttcgtgggcggcctcgcctgggccaccgacgacaacaacctccagcaggccttcagccagtacggcgagatcctcgacgccaagatcatcaacgaccgcgagacggggaggtcccgtgggttcggcttcgtcacgttcggcagcgaggagtcgatgcgccaggccatcgaggagatgaacggcaaggagctcgacgggcgcaacatcaccgt

SEQ ID NO: 7920 - DNA, 310 bp, Triticum aestivum
  Clone ID: uC-tsrow189027e07b1
tttcttggcctttcttcagactgtcatagcattacatatatttgcaagcccaatgtatgagtacttggacacaagattcggcagcggacacggtgggccttttgcaatccataatgttgtgttcagagttggtgtgagaggaggctacctggcggtgaacacgttggtggctgcgatgctcccgttccttggcgacttcatgagcctgaccggcgccctgagcaccttccccctcacgttcgttcttgccaaccacatgtacctgatggtgaaggggcccaaactttctgccttccagaaaggttggcac

SEQ ID NO: 7921 - DNA, 416 bp, Triticum aestivum
  Clone ID: uC-tsrow189027e08b1
ttcttttcagattggctttcttgcctggacaacaaagtagggttcaagggttttgctgtccccaaggaatcgcaggctaaagttgctgagttttcgttccgtgggacgccagcaaagataaagcatggtgatgttgtaattgcggctatcaccagttgcaccaacacatcaaatcctaatgtaatgctgggagctgctttggttgccaaaaaggcttgtgacctaggcctggaggtgaaaccatggattaagacaagtcttgcaccaggttctggtgttgtgaagaagtacttggacaagagcggtctgcagaagtatcttaaccagcttggcttcaatattgttggctatgggtgtacaacctgcataggaaactctggagatcttgatgaatccgtagctgctgcaattactga

SEQ ID NO: 7922 - DNA, 382 bp, Triticum aestivum
  Clone ID: uC-tsrow189027e09b1
ttgctgaggcaatagcggagggtatcaaatcaaatagtactttgatatcattatccttggcaaaaaatccgattagagacgaaggagtacactctttatgcaaggccttttcaaatttcccaattatcggtgatgaattaactgcacaaaggaaaaagaacatcgccgaacttgaaaaacaaaggaaagaattattagcaaataataatgcaaatccttttcaggcagatgaaccatttcaaataaaaagggagcaaaaccctccaaaaatgcactgcgaagatccaccatcatggattcacgaacaagtgaagttgatgtaaaaagaaaattagggggaccatcagccatgttgaacatgcccgtaagaagttaggaggcg

SEQ ID NO: 7923 - DNA, 221 bp, Triticum aestivum
  Clone ID: uC-tsrow189027e10b1
ttcttgcaacccgccgtgcgtgcacaagaacctcaagagcagcaacgtcctcctcgacgccgacctccgcgccaaggtgtcaagcttcgcgctggcgcggtcggtccccacgggcgttgatggcggcgacgcgcagctcacccgccacgtcgttggcacccaggggtacctggccccggagtacctggagcacggcctcatcacgcccaagctcgacgttt

SEQ ID NO: 7924 - DNA, 399 bp, Triticum aestivum
  Clone ID: uC-tsrow189027e11b1
tcttctttgcatctttttggttcaggaatgaagaaaaagaaaaaaacccaaagaagtttccttttgcctatgtcccaaagggaaattaaatagaaattcaacatctagtactccatttgacttttaaagcgtaacaacatttgagtcatacttttggttgtgattcttgttgcttcgattcgatttgacttttttttgaagtgtaacaacatttgagtcatacttttggttgtgattcttgttgctttgattcgatttgacttttttttgaagtgtaacaacatttgagtcatacttttggttgtgattctttttttctttgatttgattcgactttttttagcttatgaacattcaagtaagattgtgtttctttgatttgacttttttgttattaat

SEQ ID NO: 7925 - DNA, 310 bp, Triticum aestivum
  Clone ID: uC-tsrow189027e12b1
ccgtcacggaggttgacctctgcgggcacgcgacgttggcctctgcgcacttcctcttcacgactgttcttccggagcatggcaagctggagttcatgaccaggtccgggatcctaactgccaagaaagtccctgcaccagggagcactggcgtcccaggtgaggagcaggggaagctgtttattgagctggatttccccatgattggttttctggactgcaaccaaatgccgtcgattccagagaccctaaacggtgcgcccattgtcagcgttcacaaatcggctaccgacggcgacctcattgtgga

SEQ ID NO: 7926 - DNA, 268 bp, Triticum aestivum
  Clone ID: uC-tsrow189027f01b1
tgccactcgtccgcccacgcgtccggtccgccgtcgcatcgccagccaaaccctcgtcgtcgtatccgatcccgccgtcgcagtcatgccgttcaccctggtaccctgctccggcaagagcaccctcgccctcgtggccagggtctccgccgtcggcgtggggctcgtctacggctccgtgaagctcggcatgctgaagatgaccaagcccaaggaggaagcagctgatgctcatgactgaggacaagtagctccagcgagttgacgc

SEQ ID NO: 7927 - DNA, 250 bp, Triticum aestivum
  Clone ID: uC-tsrow189027f03b1
gctgaccgcgatggctgagctgctgcagtcgggctgcacgacgtcgagcgatcacctatacatctacccgaacggcagccggctcgacgacagcatcggcgccgcccagcggatcggcatgcgctttcacgcgagccgcggcgcaatgagcgtcggccagcgcgacggcgggctgccgcccgattcggtggtcgagcgcgaacccgacatcctgcgcgacgcgcagcgcctgatcgagacctatcacgac

SEQ ID NO: 7928 - DNA, 217 bp, Triticum aestivum
  Clone ID: uC-tsrow189027f04b1
tgggtgttgttggtcaaacaaataattttccatgtttggacactcagttttctgcactttagtcatttgtatggtttgtgttcatgaataatcagtggctggcatcattttatatttgcaccgtttgagtgctgattacagtaggtctacattttttagtcaaagtgtttttatgttactttgttctttcagttttctgtcagtagtttgttcaact

SEQ ID NO: 7929 - DNA, 235 bp, Triticum aestivum
  Clone ID: uC-tsrow189027f05b1
cgactccgggccggagcacgcgttctacgcccctctccctctccctctctctcacgggaggcgagtgcgagggcggaggcgaggcgaggcgcggggggtcggatttggggaggctgatcgagcaggggatccgccgcccctccatcccctccaggtttcgtgtcaggcgcgggggctccgggccgattggtctttgatcccgggcccccgaatcagctcggatcgcgcgcggatc

SEQ ID NO: 7930 - DNA, 388 bp, Triticum aestivum
  Clone ID: uC-tsrow189027f07b1
cccacgcgtccgcccacgcgtccgcggacgcgtgggtaccgcagcacgtacctgggcgcccggaccaagccggaccgggagcggaagctcagcgccaggtaccaggcctacgacaactaggagctgccggagaccgtcgactggaggaagaagggggccgttgctgccatcaaggaccagggcggctgcgggagctgctgggctttctcagcaatagcagctgttgaaggcatcaaccagattgttacgggcgacatgatccctctgtccgagcaagagcttgttgactgtgacacttcatacaacgagggatgcaatggaggtctgatggactatgcgtttgagttcatcattaacaatggcggtatcgactctgaggaggactacc

SEQ ID NO: 7931 - DNA, 308 bp, Triticum aestivum
  Clone ID: uC-tsrow189027f08b1
tcttcttgtcaccatcaaggtgctcttctgcgggatctgccacaccgacctccacatcgccaagaacgagtggggaaacgccctctaccccgtcgtccccgggcatgagattgttggcgtcgtcaccgacgctggccccggcgtcaagaacttcaaggccggggacacggtgggcgtgggctacttagtcgactcctgccgctcctgcgtgagctgcggcagcgggcacgagaaccactgccccacgctcgtgctcacctccaacgccgtggactacgacggcgccaccacccagggagggttctccg

SEQ ID NO: 7932 - DNA, 264 bp, Triticum aestivum
  Clone ID: uC-tsrow189027f09b1
tcaagaactactggaggaccagggtgcagaagcacgcgaagcagctcaactgcgacgtcggcagcgccaccttcaaggatgccatgaggtacctctggatgccccacctcgtcgagcgcatccacgccgccgtcgtcaccgccggcggcgaccccacaatgggcgacacctcgtgcgcgtcaggagtcacgtcgatggccgtcaccgccaccacatatcccgacaacaactctcccgccagcgcggtcaccaccagcaggtcgg

SEQ ID NO: 7933 - DNA, 232 bp, Triticum aestivum
  Clone ID: uC-tsrow189027f10b1
tcggagaccgccccgactgacattagagggctgctgaacacgctgccgcaattcagtgggtcaggagggatgttcctttcttactgcatggtgttcaccatgtcgctcatgccgcagcctgactggagagtcatgcttggggttttgtcgataccgtcgcttatgtactttgcattgactgtcttctatttgcccgagtcgccgagatggcttgtgagcaaaggaagaatgg

SEQ ID NO: 7934 - DNA, 233 bp, Triticum aestivum
  Clone ID: uC-tsrow189027f11b1
ttaaacagagagctcgctctccgtgaatgatgtcgaggaagaagaggaagaagaagaagcagtgtggagcacgctgctgctacctggtcatgctctcagcagtgtgaatctccagaagcatgcttgccgtgccttcttccgggtgcaccggaggctggcatgtgagcaggggtgcttcagtgacgcagaagaaaaaaggcaagtcttatcggcaagggaaggctacgcctttc

SEQ ID NO: 7935 - DNA, 238 bp, Triticum aestivum
  Clone ID: uC-tsrow189027f12b1
ttcttcccacgcgtccgctcctctttttctcattcaaatcagtcatgcattcaaaatccgctttccttctgatcgtggtggcagttagcaccacggccatggtgcacggccaccctgccgctagcactccggcggcacggttctgggagcaggccctctccggcacgcctatgccggaggtgctagctgattttgttcagaaaggaatcgatctgtcaccgcttgtggagcactactc

SEQ ID NO: 7936 - DNA, 344 bp, Triticum aestivum
  Clone ID: uC-tsrow189027g02b1
ttgctgaagcttctatggcaatcgcttatgagaagaaatgggcattgttccttagcacaaaagacacaatccttaagaaatatgatggcaggttcaaggacattctccaggagatctatgaagctggctggaaatccaaatatgaggctgctggaatatggtatgaacatcgtctcatcgatgacatggctgcctatgcacttaagagcgaaaggtgctatgtttgggcttgcaagaacctatgacggaaatgtgcaaagtgatttcttagctcaaggtttgggctctttgggcttgatgacgtcagtattgatgtgccctgatggtaaaaccatcgaagctga

SEQ ID NO: 7937 - DNA, 240 bp, Triticum aestivum
  Clone ID: uC-tsrow189027g03b1
tcactcgtccgctgttgagggacacagctccagatagtgagtttgagatttcagatccaacaaataacgttctatttggggtgaacattgatggtcaactgggcttaccacttaatgcagatgccttgattgccaatagcattgaaaatgataaattcatggatgagatggctggaaatggcatttctaactacatttcatctaaggattctcaacaagagttatcatcttcaatgattt

SEQ ID NO: 7938 - DNA, 242 bp, Triticum aestivum
  Clone ID: uC-tsrow189027g04b1
ttccactcgtccggagacccggcccgcctccgcgtccacggagtccagccgcctcacggcggggtgcacgcgaagccggctccacgcagcgtcctcctttcgccaccaccacgtccccgtcctccctcccccacccaaaacccgcctcatccccgtgtcaaaacctccgagctcgccacagcgatcgccagctcgcctcgcccacgcccacgcccgcgaccgcggagctgacccatggagga

SEQ ID NO: 7939 - DNA, 112 bp, Triticum aestivum
  Clone ID: uC-tsrow189027g08b1
ttactgcgagaggagtggccgggaggaagaggggaggagtgagccggacggacgcacgcggaggcgacgcgagcagcagcggtcacctcgcgcacgcattcggccgtacacc

SEQ ID NO: 7940 - DNA, 327 bp, Triticum aestivum
  Clone ID: uC-tsrow189027g09b1
tgctgttcgggagcagggagtggtacttcttcacgccacgcgaccgctagtaccccaacggctcgcgccccaaccgctccgccggcaccggctactggaaggccaccggcgccgacaagcccgtggtgcccaaggagagctgcggcaggacggtcggcatcaagaaggcgctcgtcttctactccggcagggcgcccaggggcgtcaagaccgactggatcatgcacgagtaccgcatcgtcgaagccgaccgcgcacccggcaagaagggatccctcaagctggacgaatgggtgctgtgccgggctgtacaacaagaagaacaac

SEQ ID NO: 7941 - DNA, 383 bp, Triticum aestivum
  Clone ID: uC-tsrow189027g10b1
ttcgaagcgcagctccacgggcggcttcgcgatggccgccgccgactacgaccgcgcgtaccgcccctacgcgccctcctccgccgacgactacgaccgcccctaccgcaacgagatcgtgccctacggcgaccgccgcatcgacctcgtcgtcaagccgccgccgcccaccaggtccccgccgccgccgttgcccgtcaccaagagcggaggcggaggcgggataggctccgcctggtgcttcagcgacccggaggtgaagaggcggcgtcgggtggcgagctacaaggcgtactcggtggagggaaaagtcaaggcctccttccgccggggcttccgctggatcaaggacaagtgcacgggcttcatccatggctgaatcc

SEQ ID NO: 7942 - DNA, 299 bp, Triticum aestivum
  Clone ID: uC-tsrow189027g11b1
tgtacgacaggatgatgcggcacctgcgggcagcggtggacgcggagggggtggagcacgacgcggcggtgacggacggcgagcagctgctgcggcagctcatcgacgccgcggcggcgcaccacgtggtgctggcggagctcaagtccgccgtggccagggccgacgtgttccacctcgtctcggggatgtggctgcccgccgccgagcgctgcttcatctggattggcggctcccgcccgtcggacctcatcaaggttatggcgcggcatatggagccactgacggagcaacaggcg

SEQ ID NO: 7943 - DNA, 331 bp, Triticum aestivum
  Clone ID: uC-tsrow189027g12b1
tttcctttcgcatccgcatcgcaccgcaattgtcttccttcctcgacggacgcacgcacgcagatctcatccaaggcaggtacaagatggctctcaccagaattggtcttgctggcctcgccgtcatggggcagaaccttgccctcaacattgcagagaaaggcttccccatctctgtctacaacaggaccacctccaaggtcgatgagactgtccagcgcgccaagctagaaggaaaccttcccctgtacggtttccatgaccctgcatccttcgtcaactccattcagaagccacgcgtcgtcatcatgcttgtcaaggctggcgcacc

SEQ ID NO: 7944 - DNA, 263 bp, Triticum aestivum
  Clone ID: uC-tsrow189027h01b1
tctcctctcgtccgcggacgcgtgggcgacgggaagcagcagcagccatggcgacgcaggccgccttcgcagtgagattcccgcagctggcgcggccgggcaggggccatggtcagggacagccggcgcgggtgggggtcgcggtgaggggcggcagggcggcggcgcgcggggtgcggtgccgggccggcggcctgatcgagccggacgggggcaggctggtggagctggtggcccccgaggagggcggccggcgggcggcg

SEQ ID NO: 7945 - DNA, 381 bp, Triticum aestivum
  Clone ID: uC-tsrow189027h02b1
tcacaccacacctctcaggaactcctcctgctggttcctgctcaatcccccaatccgtcggccgagcaatttccccatgctccaggcctcccggatgacccccgccccgacccgtcgctccctctgctgctgcttcgcctgctcgctcaatccccccggagccgtcgtcgcccgctagtcctcgccgggggagcagaagatccggtcttggaccccgcctgcgtcgccgacgtcgtcgtcgtcttcgtcccgcgtggggctgatcgttctgtggagctcgaggtgcagtgcttttgaccgagaatttgagcccaacggatgaacatgtgcgagaaagatcaaaatttccactgggcctacgaccttttccatgaccccttt

SEQ ID NO: 7946 - DNA, 275 bp, Triticum aestivum
  Clone ID: uC-tsrow189027h03b1
tcgcttcgcctccaccacatcccgccgcgggtcgggctaatccgctacgactgccgggcccgcctccgcccggcgccccgtccaccatccaccatgcatggagatctccctggacgcgctgccgcccgtgcggtcggggccggggctgagggcgcggatgggtcggatgaagaggaagacgggttcgagttcgagattgggaccctggggaaatttatgaagcctcaggggactgtaaatgtctcggctacgtacaatacatggcaccacactgt

SEQ ID NO: 7947 - DNA, 231 bp, Triticum aestivum
  Clone ID: uC-tsrow189027h04b1
tcccacgcgtccgtcttgaggcagtagagcgggagaggaatataagaaccaatcaaactcgaaatacgactatatttcatcatcctgctcttggtgatttcgaagtgcagcatttacctgttgttggtaatgatgctgaacttgaagagcgtatactgcaacacctagctgctgctgcagcaatgggaaggtcacaccaacatggcagaagagaggggcagaggaaccgat

SEQ ID NO: 7948 - DNA, 340 bp, Triticum aestivum
  Clone ID: uC-tsrow189027h05b1
tttctccagctccacgggcagaggagccgacacccaacccagcaccaacgcgctccgagcacaccaaggaaccatgcgtccatctcgggacctccggctggccgcgctcgtcctgctcttctcggcctccgtcctccacccagcagccagagcccagcaggagaccgaccaggaggaggagttcagctactcgctggacgcggagaacgggccggcgcactggggcgacatcaaggaagagtggtcggcatgcggcaaggggaatatgcagtcgcccatcgacctcgccagcccgcgcgtgtccctcgtgcgcggcctcggttacctcaaccactcctac

SEQ ID NO: 7949 - DNA, 227 bp, Triticum aestivum
  Clone ID: uC-tsrow189027h06b1
ttcctttgccctttcccctcgcacatgtcacaagaaaccatggaaggggaagtagctgttgctgtaatggaagaaaatcaaatggcggacctggtttggccatacttgaggttggtttatcagccgcccgaggaatctgcgcggcgtcgtcgccgcgaacagtactcgatattcaccatcatggaggctctgaggcaaatgattcttgaaccaatcgtttacgacac

SEQ ID NO: 7950 - DNA, 269 bp, Triticum aestivum
  Clone ID: uC-tsrow189027h07b1
ttcttttcagaaaggatgagatcgcggaatggcaggtcaggccggaagggttcgtccaccacacagctgtcaggccagtcaaccttggcgcacagcttgtacctaccccatgtgtcgtggcgcacctgggtcccaccgcatccacgcttggcggtgccgcgtccccgtccgagctcgtcgccgccctgtccctgcccgcctccaagctgccgttcctcgcccgcctgctccgccagctcgccacggcggggcgtcttcacctccaccga

SEQ ID NO: 7951 - DNA, 381 bp, Triticum aestivum
  unsure (1)..(381): unsure at all n locations
  Clone ID: uC-tsrow189027h08b1
ttggcgccggcgggatgggccagccgccgtcggactcgccgctgctcgactcctccgagcaggtctacatctcctccctcgccctcctcaagatgctcaagcacgggagggccggcgtgccgatggaggtcatgggcctcatgctcggcgagttcgtcgacgactacacggtcgtggtggtcgacgtcttcgccatgccgcagagcgggacaggggtcagcgtcgaggccgtcgaccacgtcttccagaccaatatgctcgacatgctcaagcagaccggcaggccagaaagngtggtaggggtggtatcactctcatcctggttttggttgctggctatcgggtgttgatatcaatactcaccagagttttgaagctttg

SEQ ID NO: 7952 - DNA, 298 bp, Triticum aestivum
  Clone ID: uC-tsrow189027h10b1
tcggacgcgtgggcggacgcgtgggtcctcagcaacacaagccaccgctagaatctcaagcgcggagaggaggaagacaagcaaggaagagcggagcaatggagtacgggtccccctgcaacagctgcagccgcaacaaggagaagaggcctccgctcaagagaggccagctcaagctgcagatcgccaggactctgggcagcctcgtggtgccgggcgccaagagcagcttcagcttcagaagatgatcaattgagcagccactcagccagggcaagcagcattttctcgaccaatc

SEQ ID NO: 7953 - DNA, 300 bp, Triticum aestivum
  Clone ID: uC-tsrow189027h11b1
tttcttttcacgcgtccgcccacgcgtccgcccacgcgtccgtccacgcgtccgcccacgcgtccgcatgtatctccactccggccgggcagccagtctcttcttcttcttctccagcgagcgagcgagctaggctcggaggtgagcgaaaatgccggtcagcaggatcgccgtggggagccaccgtgaggtgtacgaggtgggcgccctcaaggcggcgctcgccgagttcatctgcacgctcatcttcgtcttcgccgggcagggctgcggcatggccttcagcaagctgagccccga

SEQ ID NO: 7954 - DNA, 216 bp, Triticum aestivum
  Clone ID: uC-tsrow189028a01b1
ttcactcttccgcggacgcgtgggctcttcctctctccgttctttagtggcgtcagccatcgccgccgggaaacggggatcactttgttggtgggacttgagacgggcagaatgtcttcatcgcctccggcttcgacggtggcggacgcggcggcggtgggtcatccgtcgcagctggccatcagcaacggggtgctgctggcggcggtgatcttc

SEQ ID NO: 7955 - DNA, 312 bp, Triticum aestivum
  Clone ID: uC-tsrow189028a02b1
ttagatttcagctgaagaaatttcttccatggtcctcatcaagatgcgtgagatcgccgaggcttacctaggagtaactattaagaatgctgttgtcaccgtgcctgcttacttcaatgattcccagaggcaggcaaccaaggatgccggtgttattgctggtcttaatgtgatgcgtatcatcaacgagccaacagcagctgcaattgcctatggtcttgacaagaaggctaccagtgtcggtgagaagaatgtgcttatctttgacctgggtggtggcacttttgatgtctccctccttaccattgagga

SEQ ID NO: 7956 - DNA, 408 bp, Triticum aestivum
  unsure (1)..(408): unsure at all n locations
  Clone ID: uC-tsrow189028a03b1
ttccatgcgtccgcccacgcgtccgcccacgcgtgcgctcctctcctcgacctcccgatctctcccagaccacccacctcccggccgccgccgaggacgcccggacctcccggccggcagcaaaccaaccagccacctcgtgcgtgtttgaaaaatcatggcgcagcgggatcacaagcaggaggagcccacggagctgcgggcgccggagatcacgctctgcgccaacagctgcggcttcccgggcaacccggccacgcagaacctctgccagaactgcttcttggccggcccggcgtccacgtcgccgtcttcctcctcctcctcctcctcttctctgcngggcgtgtccgcgccgacccccgtcatcgacaggccgaggccggcgccgttggaggcggagctggc

SEQ ID NO: 7957 - DNA, 244 bp, Triticum aestivum
  Clone ID: uC-tsrow189028a04b1
tggagtctgtatttcttggcaaccggctgcaggtgtcatatgcacctcaatttgagagtattttggataccaaggagaaactggaagtccggagaaacgaagtcctcagccgaataagatcctctgttggaagcagatcagaacggttaactcagtattctccagggcagggatcttctagtgggaacttgcatcatcatatgagccccaataagagggaatacacaaagacacttcatgcttc

SEQ ID NO: 7958 - DNA, 182 bp, Triticum aestivum
  Clone ID: uC-tsrow189028a05b1
ccgaccccgggaggcacgctcccgctctcctccatcgacaagaccgccgccgtccgcgtcatggttgacttcatccaggtcttccaatccccctcctccgactcctactacgtcgacgaacaggtgtccgccatgcgccagggcttcgccagggcgctcgtcccctactacccggtggccgg

SEQ ID NO: 7959 - DNA, 304 bp, Triticum aestivum
  Clone ID: uC-tsrow189028a08b1
tccaagatgtaccagggcgccggtgctgacatgcccggaggcatggacgaggacgcgccggctgcgagcggcggtgctggccccaagatcgaggaggtcgactaagttagtcgcttttatatagtgagaaatacactatacaccattttattcagtcctgggtgccaatcatatcacctgggctggaagttttgttgtactttttggtctgtagcatcacgagacttgtgtgtgtcgtgaacaatgcaatgatgcatgttttggctcattgttgatttcagcttaatgcttattatttggactt

SEQ ID NO: 7960 - DNA, 308 bp, Triticum aestivum
  Clone ID: uC-tsrow189028a10b1
tttccttccgcaagggcgacgcctgcgagtacgcgcacggcgtcttcgagtcatggctccacccggcgcaccaccgcaccaggctctgcaaggacgaggtcggctgcccccgccgcatctgcttcttcgcgcacggcgcccgccagctccgcgccgtcaacccctccgccgcctccatggcctcgccatccccgagctcctcgccttcgccgacgcgctcctcctcctcctcctccaggccggcgctcaccgcgtcgctcagctcgcgggagctcgacttggacgccgacaaccagaaacagtacgcg

SEQ ID NO: 7961 - DNA, 311 bp, Triticum aestivum
  Clone ID: uC-tsrow189028b01b1
ttagctctgctagcaagtgcgcgatggcgcctcctccccacgagaacgagacgagcaggtcggagtcggcaccggccacccctgtgaagacggtggacgtgcagacggcggcggcaccggacgtgggggtgacggcagtggacgtgcagacggcggcggcaccggccgtgggggtgacgactgtggacgtgcagacggcggcaacgccggccgtggacacgaagacggtggcgacaccggcggtggaagtgacgacggtggacgtgcagactgcggcgagggagcagcaggacggcatgatgtactgggac

SEQ ID NO: 7962 - DNA, 354 bp, Triticum aestivum
  Clone ID: uC-tsrow189028b02b1
ttccatgcgtccgctgacggctcagaggacaacggctgctcggagcggagccttcaacggccgcagcgcccttcttgctgcgggaactggggccagggagctgagccttagggtttccctctcgcccaactcccacccccaccgcgtcggcgcttcatgcccgtggccagtgcgttgctccccctgtccttctcctgatttggaggtgccgcgcgtcagtaagaagaataccaggaacgaggaatgggaggcgttgaagacgggagttcggacgcatgttccggccgcagcttcgcaatctaggggaactcttttcgtccgccgtgtctacgacattgaggattatcagctggg

SEQ ID NO: 7963 - DNA, 377 bp, Triticum aestivum
  Clone ID: uC-tsrow189028b03b1
ttccatgcgtccggttggatagtagtcatggagatcatccctggattttcactttaccgagggttatatgagtttggtcaatatgcattctctggaactgcaatgggaaccagtggtatggagtggactaatttgagtgacccggtcaatggaatgcgtactgtattgattatcatggttatcgaatgggcaatacttctccccttggcattttatcttgatcaagtctcatcattgagtggtggactccgaaagaggttggttgatctccttgaaatgctttaagaagcgagctgcatcatttcggaggtatagcttcgggcgactaggacctaaagtaacaatcgaaatggagaaccccgacactactcaagaag

SEQ ID NO: 7964 - DNA, 291 bp, Triticum aestivum
  Clone ID: uC-tsrow189028b04b1
ttggattcgtgggtcggaacctaccttgccctgatgactgtcgtcttcttctgggttatccacaagacagacttcttcacaaacaaattcggtgtcaggtcaatcagggacagcgagtttgagatgatgtctgcactgtacctccaagtcagtattgtgagccaggctcttatattcgtgactcgttcacgtagctggtcctttgttgagcgccctggtttcctcttggttaccgccttccttctcgcacaattggttgcaacactcatcgctgtctatgccaactgggag

SEQ ID NO: 7965 - DNA, 222 bp, Triticum aestivum
  Clone ID: uC-tsrow189028b05b1
gctggtcagatccagttaacttctttggaaaaggtcctcaagacggaatctaatggatatgatgtcaaccagaggaaaaatgttattactagaggagtcctttcagtaactgttatatctgcagaggacataccagcaatggatgtgatgcggaaggctgacccatttgttgtcctgtacctgaagaagggggaaaccaaaaagaagacaaagggttgtgac

SEQ ID NO: 7966 - DNA, 226 bp, Triticum aestivum
  unsure (1)..(226): unsure at all n locations
  Clone ID: uC-tsrow189028b06b1
tccactcgtccgccctcgcgcgctcctccccacccccagagccccgtcgcctagctagggtttttgactccccgccgacaccgccgcgcgcgcgcgagagagagaccacagcgaccaacccagccatgtcggtgcgtccgagcgagcgggccgacgcgcggcggaaccgatacaaggtgaccggtggacgccgatgagngggcggcggcggcgcgaggacaacatg

SEQ ID NO: 7967 - DNA, 387 bp, Triticum aestivum
  Clone ID: uC-tsrow189028b07b1
tttcaggtttctctgtctgggctcccggcatcggcggcggcgcggcggcgggcgggcattgggagggagctcacggcggcaagcggcggcaggcggagcgggcgcgggagctctccggcggccatgccgcgatccggggcgtgatcccgccggggattgctggcccgggagggccgcggcgatgaacggcgcgagcgccggctccggctccggcggcgaggggccgctggtgtaccaggcctggaaagggaacaatgtcgtttttcctccaggggaggtttatatttggacctgatgcgagatccttgtttgtcaccatgttcctcattatcgctccagtaacagtcttctggtgtgttcgtcgcgaaagaattgatgaatagcttc

SEQ ID NO: 7968 - DNA, 429 bp, Triticum aestivum
  Clone ID: uC-tsrow189028b08b1
ttctcacgcgtccgagaccgaccacaaattcacccttaccacctacaccgccaatggcgccgcaattactgctaccagtacaaagaaggctgatcttatactcggtgagatccaatcacagatcaagaacaaaaacatcactgtagatgtgaaggccaactcagcatcgaatgtcattactacaattactgctgacgatcttgcagcaccagggctgaagaccatcttgagctttgctgttcctgatcagaaatctggaaaggttgagctccagtacttgcatgattatgctggtattaatgcaagcattggcttgactgccaatctgtagtcaacctctcgggcgcgttcggaactagtgctctagctgttggtgttgaacgtgtcgcttgatacagccacaagaatttaccaaatacaatgctgcac

SEQ ID NO: 7969 - DNA, 222 bp, Triticum aestivum
  Clone ID: uC-tsrow189028b10b1
tcccacgcgtccggtcgaaagcactagtagtagtatcatctatctatggtgtggtgtgatgaagaactcctctctccttctccggggagctccgttcttgtagcatgtaaatagtttcagcgatcgatgatgatcgacgagatgagcaagtatgatctggtagcagtatgagtttctcccctttgtgaagacaataagagggagctagcgtctggtcctggt

SEQ ID NO: 7970 - DNA, 189 bp, Triticum aestivum
  Clone ID: uC-tsrow189028b11b1
aacccgactcgatcctctgcagggaggccaagaaaatcaaggtcgagccgagcgagcgatctcgagccctgcctcgaccgatgcatccgctcgtgggggcgctgctggtgagtgccggggagcggtggtggtggccgtgctggggcccggcggcgcgccacgccggggggtgggccggcacgctggcgc

SEQ ID NO: 7971 - DNA, 360 bp, Triticum aestivum
  Clone ID: uC-tsrow189028b12b1
ttgaaccgaagccaagaagagtttcctcgttgctagcgccgctaagtagacgtcgacggcgatgggcaagatgaagatgccggccctgttccgccgccgctcctcctccaagtcgcgctccgcgtcgccgccgacgactcctccccgggaggagcagcaggaggagagccggcaggccatcgggtccccggcgcggtcggcggaggaggagatggcagcgggtcttccgcaagttcgacgccaacggcgacggccggatctcgcggccggagctggccgccctcttcgagagcctgggccacgcggccaccgaggacgagctgacccgcatgatgttcgaggcggacgcggacggcgacg

SEQ ID NO: 7972 - DNA, 268 bp, Triticum aestivum
  unsure (1)..(268): unsure at all n locations
  Clone ID: uC-tsrow189028c01b1
tccacgcgtccgaggagatccagcggaagctggcggtgctggcctacccgcgcgccagcgcgcctgcgcagtccctcctcttcgccggcgtcgagcgctaccgcctcctcgagtggctcttcttccggctgctgggcgacagatcgccattcacgcagcagaactggcagggggacagcctcgaccgcgacgaggagaacagncaggatccaacacttgcgggagatcgcggaatttccttgggtatcacgcctttcagtcgacactg

SEQ ID NO: 7973 - DNA, 302 bp, Triticum aestivum
  unsure (1)..(302): unsure at all n locations
  Clone ID: uC-tsrow189028c02b1
ttcctttcgtccgcacttcttcatggtgggctttgcgccgctcacatctcgtgggtcacagatgtaccgctccctcactgtccctgagctcacacagcagatgtgggactcaaagaacatgatgtgtgctgccgacccacgccatggccgctacctcacagcctcggccatgttccgtggcaagatgagcaccaaggaggnttgatgaacagatgatcaacgtgcagaacaagaactcttcctcttcgggaggtgggatccccaacaacgtcaagtaaggcgtgtgtgacatcccaccacgc

SEQ ID NO: 7974 - DNA, 321 bp, Triticum aestivum
  Clone ID: uC-tsrow189028c03b1
ttcctttcgtccgatccgcagcggctttacctaccgagaagaagagagaaaaaaggttcgagtgcgttgcagagtgagaagagatggctccggtgaagctgtacggcgcgaccctgtcgtggaacgtcaccaggtgcgtggcggcgctggaggaggccggcgtcgagtacgagctcgtccccatcaacttcggcaccggcgagcacaagagccccgaccacctcgccaggaacccctttggccaggtgccagctttgcgggatggtgacttgtacgtcttcgattcacgtgctatttgcaagtattgcgtgccgcaagaac

SEQ ID NO: 7975 - DNA, 305 bp, Triticum aestivum
  Clone ID: uC-tsrow189028c04b1
tctcattcagaaacacaggagagagaaaaagatcagattgcatcctcctcttccttccttctcctcgctgttcttcttgccttggtctcatggcaggccactgcctccgatcctagccccctccaggacttttgtgtcgccgacatgaattcaccagtacgtgtcaatgggtttgtttgcaagaacccaatggaggttaacgttgatgacttcttcaaggcagccaccctcgacaagcctagggtgaccaacaagggttggatccaacgtcactttgatcaaacgtcatgcagattgctggactc

SEQ ID NO: 7976 - DNA, 309 bp, Triticum aestivum
  Clone ID: uC-tsrow189028c05b1
ttacgttcattgctcacaagactggtgcagacgcacggctccacgaatccacggaccaaggtgtggaggcaggctgcagtgccgcagtaggcggaagcaacatacatcatttatgtccatcaagtcccgagagaactactaatagctagctggaaagatgttttagagaatttgtttggaggccgacagcgggctcgagtctatctctgtctcacgaacagggtggacaggttcacgactcgactgattgactgaatcggagcaaacaattcagcaaacaccttatgggcagagcttggactggcagca

SEQ ID NO: 7977 - DNA, 234 bp, Triticum aestivum
  Clone ID: uC-tsrow189028c06b1
tttgtgcagcaacccctaacagacccacggaatcggcccatagccatcttggctaccgggaggaagagtaatcccctagagccctgaggcactggctggcgctaagtatttacactgtgcgtaaccatgtacttcacgcgaaggagatacctcattagaggtgaatagtgcctaaataagactgactggtacactttatggagctacatagactacaaagacgatgcgaataat

SEQ ID NO: 7978 - DNA, 304 bp, Triticum aestivum
  Clone ID: uC-tsrow189028c07b1
tttcctgccacgcgtccgcccacgcgtccgcaaacgcatgacacaagtgacagccacggcacaatcgtcaggtcctccgccatgtctctcacggtctagttcgttcgttctcgccaacgcgatggcgacgccggcccgccggccgtcggcgcagcagcagcagccgctgacggtggacttcgaggcgctgagctacatcagcaggctcgtggaggcgttcaggcgttcgactacgacaacgacggcctggtcacggcccccgagctccggggcctcctggcctgcctgggcctggacaagtcgg

SEQ ID NO: 7979 - DNA, 423 bp, Triticum aestivum
  Clone ID: uC-tsrow189028c08b1
tttcctctgacgcgtgggtcgccgtcgcctctccactttcgtctctctcactcactctccccctccgccgccggcgcagcgtcctccccgcgactccgatggccagcaagtgggtcaggcccgaggtgtacccgctgttcgcggcgacgggcgtcgccatcggcatctgcgccttcagcctcctccgcaacatcaccggcaacccagaagtcagggtcaacaagatggggagggcagcgggagtgcttgagaaccatgaggagggcaggcgctacgccgagcatggcctcagagcctatgtgcaggacaagacccccgagatcatgccaggaatcaacaagttcttcaccagcccgaaatgaagcactttagcctgtcagtggctcgctattagtaactgttggggtcaagtgcaaacctatt

SEQ ID NO: 7980 - DNA, 377 bp, Triticum aestivum
  Clone ID: uC-tsrow189028c09b1
tcttcctgcgacctgagccgagagagggaaggaaacaccaggaacctcctcctccctcctctcctctcccctctccccctcctcctcccccgcgcatcctcgagcgagcccctccggccggcgacgcgggacgcggcatggccaccggcggcgacaacgggtgcggcggcgggggggcggcggcgcccggcggcggcgacctgtacgccgtgctggggctcagcaaggagtgctccgacgccgacctcaagctcgcctaccggaagctcgccatgagatggcatccggacagatgctcgtcctccagcgggaccaagcgcttggaggaggccaaggaagaagttcagggagatccagggcgcctatttccgtcctct

SEQ ID NO: 7981 - DNA, 263 bp, Triticum aestivum
  Clone ID: uC-tsrow189028c10b1
tttcctcccacgcgtccgcccgacgctcaagcccccagacgccgcagcgccgccactccacccgcagcggcaaccatggcggtcggcaagaacaagcgcatctccaaggggaggaagggtagcaaaaagaaggccgtcgatccgttcaccaagaagcagtggtatgacatcaaggcgccgctgctgttcaccagccgcaacgtcggcaagaccctcgtgtccaggacacagggtaccaagattgcctcagagaggtctgaagc

SEQ ID NO: 7982 - DNA, 291 bp, Triticum aestivum
  Clone ID: uC-tsrow189028c11b1
ttacctgtcagacacatcgctgcttccatcctcttccccctttccccacccgcgtgcgagcggccacccaagaccaaccgcgtccagatccggcggcggatctccccatggcggccggagccctgggcctggccctcgtcgcggcgctcgcggtcgcgctggcgggggccaactccgagggcgacgcgctctcggcgctgcgccgcagcctgcgggaccccggcggcgtgctgcagagctgggaccccaccctcgtcaacccctgcaactggttccacgtcacctgcgacc

SEQ ID NO: 7983 - DNA, 219 bp, Triticum aestivum
  Clone ID: uC-tsrow189028d02b1
tgtggtagccacctcctcgccgtctcctccgccgccgtcggctgcctctaggcctcaggccgcctcccagacgcggccaatggaggcgccgacgggcctgcacaggctgcggggcccgtcgcccatcgtgtgggccatgcgcacccgcgtcgccccgccgccgcggctcgcgggcccaatcccccgccccgtctaccctgcccatcccccgccgcgggc

SEQ ID NO: 7984 - DNA, 225 bp, Triticum aestivum
  unsure (1)..(225): unsure at all n locations
  Clone ID: uC-tsrow189028d03b1
tcccatgcgtccgcttttttttacctcggagccacacagactctcaccacatcccaggaaccagagcagcaagccttgtggagctcggctcgagcatggacaccaagcatgcggattcgttcgacgagcgcgacgtcgtcgtcgacgccggctgcgtccgcgccgtgctcggggagctggtcctcaccttcctcttcgtcttacncggagtcgccgccgccatgg

SEQ ID NO: 7985 - DNA, 351 bp, Triticum aestivum
  Clone ID: uC-tsrow189028d05b1
ttccatgcgtccgctgcggggcgcgggcaggcggcggttgctcgttctgcttggcgtatggtcggccggatggagcggcagacggtgtcgacgtcctccgcgtcctgctccccctccggcgcctcgtcctcatcctcctcctcctgcggcggacggaagcggcccgacatactcaacatgatccggagtgcagcatgtcttaattcatcatctactgatactggcaaggggcggagtaagcaatcaagcaccaaggtgacgcatggattccacttggttgaagggaaatctggccatgacatggaggactaccatgtagcagagtacaagtgtgataagaatcatgagctt

SEQ ID NO: 7986 - DNA, 355 bp, Triticum aestivum
  Clone ID: uC-tsrow189028d07b1
tcagcagccacccacctgccgagtgccgagccgcagcctcacacgcacggtgcgagtacgtggtgagagctgtgcgctcgtgcctcgatccatccctcaaccctccgtgtgtgtttgtaaggcagcgagagcagccatgggcgtggggaagaaggtgctgaacgacgtgaagccgtacatgatgatgatcctgctgcagatcgggtaccgccgggatgtacatcgtctccgtcgcctcgctcaagcgcggcatgagccactacgtcctcgtcacctaccgcaacctcgtcgccacgctcgtcatgctgcccttcgccctcttcttcgagaaggggacacggcccaagatgacact

SEQ ID NO: 7987 - DNA, 329 bp, Triticum aestivum
  Clone ID: uC-tsrow189028d08b1
tcctcgcgtccgacggatacgggttcgtgccgcgtccgtacggcgacgtccaagatggttccgggaagaccctcgccatcatcatcggcatcgtggcggcggcggccatcatcatcatcttcctctccttcgtccgaagagcccgcgccgccaatggcaaaagctaagctaagggttgcagcagggatggtcgccactcgccactattagctcagatttggatcggtcggtggcttttggcttcggcgttgctttagtatctctccttttatcttttatggtctcttttgccgtgccagaaaaacaaagggaggccatgccgccactgt

SEQ ID NO: 7988 - DNA, 317 bp, Triticum aestivum
  Clone ID: uC-tsrow189028d09b1
tcctttcacgcgtccgcggacgcgtgggcagctctgttccatccagtcacgaagcagaggagagagctgtactcctacgtctgtaggctcatagctggggagatggtgctcaacggcgccctgttcttgctcgtctgcgcggctgctcgagctgctgcgtcgggcggagacggcccgctgctgaacgggaacttcgagcacgcgccgaacaggtcgcagatgaacggctcgagggtgacggggaagtacgcgatcccgcactggaaggccaccgggttcgtggggtacttcgagtgcggcgcgaagcaggaccacat

SEQ ID NO: 7989 - DNA, 306 bp, Triticum aestivum
  Clone ID: uC-tsrow189028d11b1
tgcgctgctcaagaacttcgccgctttcctgtgcgtgatcctggcctcgctcgccttcgtcgcgcaggatgcgctcgccgccagaggtgctttgaacaacgtgaagggatacacgggtacctacacaggcaacccaggcggtggttacggcggtggttatgggaacgggaagtatccatgataggccgtgtatgatgatacttggtgcacggaaatacaaatacgtacggcagaccatgaataaattgtcacccgttactggcatatcgtactctctctgatccataataagtttcgcagttttgt

SEQ ID NO: 7990 - DNA, 248 bp, Triticum aestivum
  Clone ID: uC-tsrow189028d12b1
tgtgtcctcccgattgttcgtgccacacccccgtccgtcgtgagtcaagcagggagccaatcctctggttgaatttgaacatagcatcagcatcggccgttcaactgcgggcggtggtagtggttgctgcctttcggcgctggtgctatggatagattcaaccgaatggttgtgacatacccgattgaaagaagaagctttgctcccgcgcacatccaggccggtgggattagagtgccctggtggcg

SEQ ID NO: 7991 - DNA, 254 bp, Triticum aestivum
  Clone ID: uC-tsrow189028e02b1
ttgttctgaggtcagaggcgccgttgacgccgacaaggcagccggtctgtgttccggcgccgagctcgaatcggcggagccgggtgtttcggatgcgagatcagaagctccggcggcgcgaatccacgaacagaagctgggttgcgggagtacgggttccgatgaagctgccgcaatcagccatatcccctcaccggttgagccgtcgccgtcagacgccagttcgaattcagacaccaacaccaccactgggg

SEQ ID NO: 7992 - DNA, 109 bp, Triticum aestivum
  Clone ID: uC-tsrow189028e03b1
ccgcttgtcggtgtgaaacatggtcagtcatatgttgttgtatattggatattttgccattttgttggagattatcaaccaatcaataaaagttgcagggttttgtttg

SEQ ID NO: 7993 - DNA, 297 bp, Triticum aestivum
  Clone ID: uC-tsrow189028e04b1
tgtgtgagacccgaccagcgacccaacgacccagcgtcgacctacctcctaccctcatcgatccattgatccattgatttgattgattaattgatccgccaccgccaccaccaccgccgtggagaaaggagggatggcggcggcgggcgggaaaggggggccgaggcggacgacgcgggtgggcccgtacgagctcggcaagaccgtcggcgagggcagcttcgccaaggtcaagatcgccaaggacacccgcaacgccgtcacctgcgccatcaaggtgctcgaccgcaaccacgt

SEQ ID NO: 7994 - DNA, 297 bp, Triticum aestivum
  unsure (1)..(297): unsure at all n locations
  Clone ID: uC-tsrow189028e05b1
tgaggtatggcaacaatttgaggaggctgttcaaagtgactatgtaccaggtttcgggaagaaaatcagcagcctgcttgatagatgtttatcagaatacgacatggaggctatttattttgatgaaggtgtcagaacatcaaaaagacatcaacttgagtctaaactcttgcagcttgtcaatcctgcgtaccaatctcttcttggtcatttacggactagaactttagaagcattncaaagagtcctttgatagggccgttgaaaaggagggatttgctgttgctgctcgcgatt

SEQ ID NO: 7995 - DNA, 270 bp, Triticum aestivum
  unsure (1)..(270): unsure at all n locations
  Clone ID: uC-tsrow189028e06b1
taggttcacacgcacgcggggtgcaaattgcaatgacgcccaccttcgccgtgcgccggcgagaaccagtcctcgtcgtcccggcctccccgacaccccgggaaacaaagcgcctctccgacatcgacagcaaggagtctctgcgggtgctcatgccgggcgtcttcgtctaccgcggtggcccggcgcgcnggcgacgacgacccggtggacgtcatcggccgagcgctgtccgaggcgctggtgcactactaccccctcgccgggcgc

SEQ ID NO: 7996 - DNA, 256 bp, Triticum aestivum
  Clone ID: uC-tsrow189028e07b1
tgtcagatcaggcgcgccgagggcgccgacgggctcttgtccgggatctcggccaccatgttgaaccagacgctctactcacacgggtgggctctacgacatctagaagcgctgacccaggaaacgccgggctgcgtgaccgaagatcgcgcggctatcccggcggcgcgcgcggccgtcggcaacccggccgacctggccatggtgcggatgcaggccgacggccgtctcccgctggccgaccggaggaactacc

SEQ ID NO: 7997 - DNA, 355 bp, Triticum aestivum
  Clone ID: uC-tsrow189028e08b1
tttccttccacgcgtccgtccacctccgccgcgataagccctagcccctccacctccttctccatggcgaccaccaccacccttttccatccgctctccgtgcccatcgccgggggacgcgtccggcgctgccccctcaccctgctcgccccggcccgcacggccccccggcggccgacgcccctcctcgtcgcccgcgccaagcgcaccaataactccaccgctgccccgaagcgagaggcggacgaggaggtcgaggtcgaggaggagctgccgtggatccaggacaaggcgctggacctcgttcgagttcaccggcaccgtcacgcaggccatccctggcccccgcgtcggc

SEQ ID NO: 7998 - DNA, 302 bp, Triticum aestivum
  Clone ID: uC-tsrow189028e09b1
tttcctgagagaggtagagagagagagagagagagagggagaggggggaggggagaccctgaccaatgccaagaacaagaagagatcagtgaaaatccccaccgggcgagaggagacaagctccggcccccgtcctccaagaacaagaacaagagcaagaaggaatccgggagcacgagggaataaagcggccggaggagaccggaaaggccgaggagaaaaaagctccggcgacgatggagaagggattggatccggcgctgctggacaacatcatcgccaggctgctggaggtgaagagc

SEQ ID NO: 7999 - DNA, 388 bp, Triticum aestivum
  Clone ID: uC-tsrow189028e10b1
tctctgccaccaaggagggtctgaagcttgatgagagcgaggacgagaagaagaagcaggaggagctcaaggagaagttcgagggtctgtgcaaggtcatcaaggaggtgctgggtgacaaggtggagaaggtcatcgtctctgaccgtgttgtggactctccttgctgtctggtgactggtgagatgggtggactgccaacatggagaggatcatgaaggcccaggccttgagggactcgagcatggctggctacatgtcgagcaagaagaccatggagatcaaccctgagaacgccatcatggacgagcttcgcaggcgcgccgacgccgacaagaacgacaagtctgtcaggaccttgtgatgctgctcttcgagacctccctgc

SEQ ID NO: 8000 - DNA, 340 bp, Triticum aestivum
  Clone ID: uC-tsrow189028e11b1
ttgctttcacgcgtccgccacgcgtccgctccagagcagcagctcagccgccgtgatctgtaatcgccgttccaaaagagagcagtttagaaaggttgtcggtggcccaagctctgatcttcagcctgcatctagctagcgcagatgtcgttccgcagcatagttcgtgatgtcagggacggtttcggcagcctgtcgaggcggagcttcgacgtgaccatctccggcctctccggcctcaccgggcaccacagggccaagtgccagagcacggtgcacgagctccgcgacgccgatctcatagtccaggagagccgctgggctagcctccctccggagc

SEQ ID NO: 8001 - DNA, 323 bp, Triticum aestivum
  Clone ID: uC-tsrow189028e12b1
tgcctctggcgtatacttcatcccggcgctcacgagcagcgtcgtgagtgtcggacaactcgacaagggctggttcgacatcggcatccggcgcggtgttctcaccaagcatgaccagcagaagaggctgctcatcaaggttacccgttctcctaaccgcctctacaaattattttttcaacccgtgcatcatgtgtgccttgccgtgggccatgttttcgacgcgtggcgttggcatgccaggctaggacaccagcactttgacgggctgcagaagatgacacgaggcaaccttggtcatgggctacctcacataaagcacg

SEQ ID NO: 8002 - DNA, 286 bp, Triticum aestivum
  Clone ID: uC-tsrow189028f01b1
ttcctttcgtccgaagcaatgtcatctttaggcagttacttcggtcgagacggccatttactgcacaatttactgatgctatgggtaatgagatattcacggtccgccggccattttggttcatcaacagctccatttatgcagaagtggatggcaaggaggtaggtgtagtccacaggcgctggcatctttggcgtagaatttatgatctgtacttagggaacaagcaatttgctgtggttgagaatcctggattttggaactggacttttaccctggattgatg

SEQ ID NO: 8003 - DNA, 238 bp, Triticum aestivum
  Clone ID: uC-tsrow189028f02b1
taaatttcccaatctcctcccgcactcaacccaatccccacctacccgcaccccatggcgccgaaggcggagaagaagccggcggcgaagaagcccgtggaggaggagcccgcggcggagaaggccgagaaggcgcccgccgggaagaagcccaaggccgagaagcgtcttcccgcggcgggcaagacctccgccaaggacggcgacaagaaggccaagaagaagagcaagaagagcg

SEQ ID NO: 8004 - DNA, 225 bp, Triticum aestivum
  Clone ID: uC-tsrow189028f03b1
tgtctttcgtactgttatctggatgggaaagaagcaagagtctgttgaggatgttccctgtggtaacactgttgcgttggttggtttggatcagttcatcacaaagaatgcaaccctgacaaatgagaaggaagttgatgcctgcccaatcagggcaatgaagttctctgtgtcccctgttgtgcgtgttgctgttcagtgcaaggtggcctcctgatcttccca

SEQ ID NO: 8005 - DNA, 299 bp, Triticum aestivum
  unsure (1)..(299): unsure at all n locations
  Clone ID: uC-tsrow189028f04b1
cgttttcaaaccaccccgcgccgcggtccacacgccacgcgctacctcagctcagctcagctcctccctatctatacgcccacgagcagtatataagcagcctcgccttctaatcctcgaggccacacccgacccgagagcaagaaacaagcaacgaagtttctgtttcgagcaaggagtggtagagatttcaaacgagaggttgntcagttaacccgagggttgaggagctgaaagaaatggcgacgaccaagctgtccccgctctcgcctgtgcggccggacgacaagcggcgcgcg

SEQ ID NO: 8006 - DNA, 402 bp, Triticum aestivum
  unsure (1)..(402): unsure at all n locations
  Clone ID: uC-tsrow189028f05b1
ttctagtccaagaagaagctcccgctagctttgcaagagtcactgaccgccgcctttgctcagatcccagtcgcgtcgtttcctgatgttcctagtggccgggtgactgaaattcctggagaaacttctgtgcttgatgctgttagaattttatctgagcacaacataagggcggcgccagtgcttaaccctgaacctggggttccggccgattggcagggaggtatcttggcatcatcgagtactcagccatcatcctttgggtactagataatgnctgatctcgcggccgtagctctgtcagctggatcggcaactgccgcangagttggaatgggcgctgttggtgcatggggcgtggcagcattaggtgcaaccggccccgcagctgtcgtggattga

SEQ ID NO: 8007 - DNA, 303 bp, Triticum aestivum
  Clone ID: uC-tsrow189028f06b1
tcccacgcgtccgctcgcccgccgccgccgcctcctcctcctcctctcggctccttctccttccccagtttcagccatgtgtaaggagaagactcacatcaacatcgtggtcattggccatgtcgactctggcaagtcgaccaccactggccatctgatctacaagcttggaggtatcgacaagcgtgtgatcgagaggttcgagaaggaagccgctgagatgaacaagaggtccttcaagtacgcctgggtgcttgacaagctgaaggccgagcgcgagaaggggtatcaccattgatattg

SEQ ID NO: 8008 - DNA, 262 bp, Triticum aestivum
  Clone ID: uC-tsrow189028f07b1
aagctcgtccaccgtgaccaaggcgctgtacaagcctcaggggctgcagcgcggccgatacagccccaatggctctgatcagtcgctgttctacaattccaccagctactgggatgagtttgtgtggggcggtgcgtggatgtacttcgccacggggaacacatcatacctcaccatcgtcacagctgcagggatggcgaagcacgcgggagcgttctggattggtagcccaaacttgggagtgtttacctgggatgacaag

SEQ ID NO: 8009 - DNA, 323 bp, Triticum aestivum
  Clone ID: uC-tsrow189028f08b1
tttcttttgaacggcacttgcacatgggtaagccgatcctaagggacggggtaaccccggcagatagcgcgatcacgcgcatcccccgaaagggaatcgggttaagatttcccgagccggcatgtggcggttgacggcgacgttaggaagtccggagacgccggcgggggcctcgggaagagttatcttttctgcttaacggcctgccaaccctggaaacggttcagccggaggtagggtccagtggccggaagagcaccgcacgtcgcgcggtgttcggtgcgcccccggcgggccatgaaaatccggaggagcgagtaccg

SEQ ID NO: 8010 - DNA, 193 bp, Triticum aestivum
  Clone ID: uC-tsrow189028f09b1
acgcgtccgagcaacggcgccaccaagggagcagttagttggctggacgatccgactggctactggctactggtagcagcagctgatcctgatcgagagcgatggggtgggcgatcgcgctgcacggcagcgccggggacatcccgcgcacgctgccgccggagcgccgggagccccgtctcgccacgctccg

SEQ ID NO: 8011 - DNA, 376 bp, Triticum aestivum
  unsure (1)..(376): unsure at all n locations
  Clone ID: uC-tsrow189028f10b1
tttcctctgaggcagcaggcaagccaaggaaggagcgaggaagctagctccggtggagaggcgacttgtttgttgtgcatggaaggggcggggagcggcgggaagatgggaggaggagaggggatggccggccgtgccggtgccggtgctgcgtgggcggccaaggagaagaccggcttcgccgccacctgcagcctcctgagccgctacatgaaggagaagaagggcggcgcactgcagggcctcgtcggcctcgacatgtcgccgccggctgccgtcgtcgatgaaggaggagctttccagccgcccaccaccatgaacctgctttcggggctagaggagccaaacgccgcncacgtggagctccccctcgaga

SEQ ID NO: 8012 - DNA, 330 bp, Triticum aestivum
  Clone ID: uC-tsrow189028f11b1
tttctttaagcaacacacgaaattaagcaagcgcacacacacgccagcatggctgccaccatgaagctgacaatcaccttcctcctcctcgtctccgggctggtggtgttcggcgacgccaagaaggcgccgtgcgccgtggtgtgcgtccagggagggcacatcacctgcgacaactaccccgggcagaagctcgacgggtgcgactgccagtgcgcgcccaaggacggcaagggcctgcgtgctccacctcaacagcggctccaccaaccagtgcaccaccacgccggagtactggagatgaatacatgcggttcgtcattgctggct

SEQ ID NO: 8013 - DNA, 206 bp, Triticum aestivum
  Clone ID: uC-tsrow189028g01b1
tctcattcgtccggaggagagagacccagcgcagaaaagggacgccgcaaaagggcccccggggacagcgagaggtgtaggcagcagcagcagccagcggggaggctggttgtggttggtcgtcgcgggcgggatggagagcgagatgtcggacgcgcagcccccggcggctgcggcgcccgtcgccgagccgctcgccgccgtgg

SEQ ID NO: 8014 - DNA, 168 bp, Triticum aestivum
  Clone ID: uC-tsrow189028g02b1
cagctcgcccaccaccagacgtaccacgttcagagctagcagcaccatccatggccgcggaggagcccaagaaggtggaggtggaggcggcgccggagccggaggccgcacagccagccgtcccggccgcggagcccgaggcccccgccaaggacgttaccgaggaga

SEQ ID NO: 8015 - DNA, 220 bp, Triticum aestivum
  Clone ID: uC-tsrow189028g03b1
ttgtgtttgtgcatgatgaattttacattggcttgaggcatagaggggccattggccaggagtatgctgattttctgcatgaatttatggctgctgtgaagcaaaactatggggagaaagttctcattcagtttgaggattgtgcaaaccacaatgcctttgatctccttgcacgatatggaacaacccacctggtattcaatgatgacattcagggaac

SEQ ID NO: 8016 - DNA, 262 bp, Triticum aestivum
  Clone ID: uC-tsrow189028g04b1
gacggagtggttgctgaaaagcacagcatggttggcgctggatctcttgtcaagcagaatacaaggattccttctggggaggtctgggttggtaatcctgccaagttcctaaggaagctgacagaggaggagatcacattcatcgcccaatcggcagccaactacatcaacttagctcatgttcacgccactgagaattccaagagcttcgatgagattgagctcgagaagaaactgaggaaggaagtttgctcacaaagat

SEQ ID NO: 8017 - DNA, 234 bp, Triticum aestivum
  Clone ID: uC-tsrow189028g05b1
ttccattcgtccgcttttctctctcctccctccccctcacacgctttgcctttgcccacgaaaaggacaaccaacccggagcgacgcagccaggcaggggtgaagagaagagaagagaggagaaggagaaaaaaaaaggcataggcatcattccagcatcgggttctacggaggaggtgccggtttggacatctgatccatttggaggggtattgaccgcttcagagccagagc

SEQ ID NO: 8018 - DNA, 245 bp, Triticum aestivum
  Clone ID: uC-tsrow189028g06b1
tctcttgcggctagggtttcctccgcttcgctctcgcagaatgcctcgctacgatgagcgtgatcgttacggtggcaacacaaggctgtacgtgggtcgtcttccctcgcgcacccgcacaagggacctcgaagacctcttcggcagatatgggagagtgcgacatgtggatatgaagcacgagtttgcatttgttgagtttaagtgatcccagggatgctgatgaagcaaggtacaatcttgat

SEQ ID NO: 8019 - DNA, 369 bp, Triticum aestivum
  unsure (1)..(369): unsure at all n locations
  Clone ID: uC-tsrow189028g07b1
ttccacgcgtccggccacctccccaccatcgttaccaatggcgacgaccccgcgcctcgcctccctgctcctcctgctcgcgctctgcgccgcggcggccggcgcgctccggctgcccccggacgccagcttcccgggcgcgcaggccgagcgcctcatccgcgcgctcaacctgctcccggggcgtcctccggccgcggctcgtgcggggcgggggacgtcgcgcccgggcagctgctggagcgccgggtcacgctccccgggctgcccgagggcgtcggcgacctcggccaccacgccggctactaccgnctncccaacacccacgacccagggatgttctacttcttcttcgagtcgcggggcaag

SEQ ID NO: 8020 - DNA, 258 bp, Triticum aestivum
  Clone ID: uC-tsrow189028g08b1
tctagcacttgctcgaatcattgaagggaagacacctgaggaaatccgcgatatttttcatttaccagatgacttaacggaggaagaaaaattggagccactgaaaaatataaacgatgatcccaggattcgcttattgaatcgattgtatgcaaagaaacggaaagaactacaggagcgccagaaactaaaggatattcaggtacagcaagagcaaaaggatgagcggtctttggacgagttactttgttttataaa

SEQ ID NO: 8021 - DNA, 248 bp, Triticum aestivum
  Clone ID: uC-tsrow189028g09b1
agctcaagcggactctctccatcgcacaacttgctctctcttggcccatgcatctagatccatccatggcggcgataggcggccacccttactcgccaagtgacctggagctccccggtttcgtgccgcagcagctttcacccatcgaactcgtggtgcccctcataggcacttctctcttggtcatcacgggtgatctggcttgtctccggccatgtcctcaatagtggaagacccagcagactatc

SEQ ID NO: 8022 - DNA, 90 bp, Triticum aestivum
  Clone ID: uC-tsrow189028g10b1
tcccacgcgtccgcccacgcgtccgcccacgcgtccgaaaaaaaaaaaaaaaaaaaaaaaaaaaaaaaaaaaaaaaaaaaaggggcggcc

SEQ ID NO: 8023 - DNA, 345 bp, Triticum aestivum
  Clone ID: uC-tsrow189028g11b1
tttctttcagcttgttctctgcatccaccaagaagtcgcctccgttgctttcctccagcagtgcgcgcccctcctctcgagatcttctccgagttcctgagatctggttgtaagcagccaagatggtgaagatctgctgcatcggagctggctacgtcggcggcccaaccatggctgtcattgccatcaagtgcccgcattgagggcggttgtggacatctacaagccccgcattgacgcctggaacagcgacaccctcccgatctacgagcccggcctcgattgatgttgtcaaggcctgcacggggaagaacctcttcttagcactgatgttgagaagcatgt

SEQ ID NO: 8024 - DNA, 343 bp, Triticum aestivum
  Clone ID: uC-tsrow189028g12b1
tttcttttgatttttcaactggtttcggagatgaaagccgaatattttccacctagggaggatgtcattttgcagaatgaagcacccactgacttctacattttagtttctggtagtgtggaattagtagaggttccaaatggtgcggaacatggtgcagaacaggtggttggagtggccaagtcaggagaggttattggagaaattggggttctttgctataggcctcaattattcactgtccggacaagatccttatgtcagcttctacggatgaatcgtacggactttctcagcattgttcaatccaatgttggagatggaactatcatcatgaacaacc

SEQ ID NO: 8025 - DNA, 156 bp, Triticum aestivum
  Clone ID: uC-tsrow189028h01b1
tgtatctgagataccttcctgtccatcatttccagagcctaatgtccgaagaggcgcgtggtttgatgttattgctgtgaaacttccctgtacaagggtggctggttggtcaagagatgttgcaaggcttcatttgcagctctctgcggcaaaact

SEQ ID NO: 8026 - DNA, 72 bp, Triticum aestivum
  Clone ID: uC-tsrow189028h02b1
tatctttgcagctgctaggatgaggttggcagccactgagaaagcggaagcggagaagatactccagatcaa

SEQ ID NO: 8027 - DNA, 191 bp, Triticum aestivum
  Clone ID: uC-tsrow189028h03b1
ctatgggcaactgcaagagtgtcatgctcgtgcactcctaggaaagggccaggttgttccggatccagaatggaggattcgggacttcggaaagacccatgttccagatttcgaatggaggattgatgacttctcatcactgcttaagactggagctaagagagcaacatctggcccttttcactgctctg

SEQ ID NO: 8028 - DNA, 370 bp, Triticum aestivum
  Clone ID: uC-tsrow189028h04b1
ttcctttcgtccgggtcattcttccaaactcttaggcagggccctcgcacacactgtatcatgcatgacctgatccatgatcttgcagtgtcagtttcaaccaatgattgctttcaaattgagcctggcatgacccgttctatcccctcaacggtgcgccatatctcggtcactacagatggcgtacaagacatcaatgctgccatcaacatgctaccgaaaaagctgcgcaccttgttagttctgagaactcgttctttctcctcatattgccttcaaggagacttcttagcgaagctcaagacttggcgggtgcttgatattagccactctgattacactgaattgccaatgtccatttcctgcttaa

SEQ ID NO: 8029 - DNA, 141 bp, Triticum aestivum
  Clone ID: uC-tsrow189028h05b1
ttcctttcgttcgttggaggagtcatgactgagctgatcaccaggaacaccaccatccacaccaagaaggagcaggggttatacacctactccgacaaccagactggtgtgctcatacaagtgtttgagggtgagaggaca

SEQ ID NO: 8030 - DNA, 349 bp, Triticum aestivum
  Clone ID: uC-tsrow189028h06b1
tccacgcgtgacccacgcgtccggccaagagctcagagaagcaccggccatggagggcaaggaggaggacgtgcgcctgggcgcgaaccgctactcggagcaccagcccatcggcacggcggcgcagggcggcggcgcggacgagaaggactacaaggagccgcccccggcccccttcttcgaggccggggagctcacctcctggtccttctaccgggccggcatcgccgagttcctggccactttcctcttcctctacatctcggtgctcaccgtgattgccgtggtgggcaacccgtcggggtccaagtgcggcacggtcggcatccagggcatcgcctggagcttc

SEQ ID NO: 8031 - DNA, 315 bp, Triticum aestivum
  Clone ID: uC-tsrow189028h08b1
tttcttttttggctaacgatgctcatgtaacaacgcttaactatcttgttgcatgcatgctcatcactagctggcattgtgcaggcgtcgctgtacgctcacatcagaaccagactggaagggatcatcctgacttcaccagctgtgcgtgtaaaaccagcacatccgattgttggggccgaggcaccgatattctctatcatagcacccatgttactattcaagggatcacacaagcggggcattccggtgtatcgcgaccccgccgtgctgctggcgaagtactctgacccactggtctacaccgggccgatc

SEQ ID NO: 8032 - DNA, 280 bp, Triticum aestivum
  Clone ID: uC-tsrow189028h09b1
tttctttcttccggaggagagagacccagcgcagaaaagggacaccgcaaaagggcccccggggacagcgagaggagaaggcagcagcagcacgcgacggggaggctcattatggtccacatcggccagcccgatatccaggtcgataacgcctgctgagagctctactgcctcgagcacggcatccagcacgatggcaccatgcccagtgataccacgagtcggaggttgcacacgatgcgttcaacacgttcttcagtgagaccggtgcgggcaagca

SEQ ID NO: 8033 - DNA, 376 bp, Triticum aestivum
  Clone ID: uC-tsrow189028h10b1
ttccttaaaaaagtggagaaagtgaaggttgcggtatttgctggtggtgttgacacttctgcaactgaaacaaagggaactgttcttatacattctgctgagcagcttgaaaactatgctaaaactgaggaagcaaaggtggaggagcttatcaaatctgtggctgattcaggtgccaaggttattgtcagtggagcagcagttggcgatatggcattgcatttttgtgaacgttacaagctaatggttctgaaagtcagctcaaagtttgagcttcgaagattttgccgtactactggggctatagcacttttgaagcttagccgaccaaatgtggacgaattaggatatgcagactctgttttggtggaagaaa

SEQ ID NO: 8034 - DNA, 437 bp, Triticum aestivum
  Clone ID: uC-tsrow189028h11b1
tttccttggacgcgtgggcggacgcgtgggagcagtccttcattattttctttaaaaacgcggaagcccggtgactggagtaggcgaagcagggagcaatgtcgccaccgacgaagaaagagagggcggcagaggccagggcgagctcgtcaaaaccgatcgtctcggcggctccccaggttcagcggcggagggtgggtggtaggcgggtggacgagctgccggatatccttctacgcctcccgcgtctacttcctgctcatcatcctccagatcccgctcttcagggtcccttgtagagcaggcacatgcactacacctattcaaattacatcttcacagttggtctcaaatgagatattcccaccatctgttgtgaaggccatgctctaccctggagttatagtgcgcaacctcactcaagaatgagcatgaca

SEQ ID NO: 8035 - DNA, 279 bp, Triticum aestivum
  Clone ID: uC-tsrow189029a02b1
aatcggagctgcggaagcgcgaaggggacgcaagggagcgaggcgctgcgcggcagcgggcaaaccctaggcgtacggcgggcgccacaacccccggcggagggcaggctccgcacggctcggctcgattctgccggctctgaccccgccaagcggccatgtcgaacaggtccatttgcaagttctttgtgaatggtgcttgctttaaaggagactactgccaattctcccatgactggaatgatcaaccaaatgatgtgtgcacattataccagaacg

SEQ ID NO: 8036 - DNA, 271 bp, Triticum aestivum
  Clone ID: uC-tsrow189029a04b1
tgctcgccatggcgcacgcggcggcggcggcgcaggtcgacgtgcgcatcgcggagccggacaaccacacggacatgcccaacttcgcgcggctggtgaactcggcggacgtgatgatgggggtgcacggcgccgggctgaccaacatggtggtcctcccgagccgcgccgtgctgttgcaggtggtgccgttcggcgggctggagtggctgacccgggtgacctataaggacccggtcaaggacttcgacgtgacctacatggagtacaa

SEQ ID NO: 8037 - DNA, 319 bp, Triticum aestivum
  Clone ID: uC-tsrow189029a05b1
tgtcgttctgcactagtcgctgcaagaaccaccaccacaagtgagtgaacgtcggagcaaggaaaggcagggagagatggcaatgaggccgctcgtcgtcctggctctggccgtggcgctggccggggtggcgctgcgagggggcgccgcggagggggccggcgagtgcgggaggttctcccccgaccggatggccctgcgcatggccccgtgcatctcggcggcggacgagccggactcggcgccctccagcagctgctgctcggcggtgcacaccctagggaagagccccagctgcctgtgcgccgtcatgctgttc

SEQ ID NO: 8038 - DNA, 108 bp, Triticum aestivum
  Clone ID: uC-tsrow189029a06b1
tacatgctgggcaactaccctaccgcttggtgctgaccgtccgtcggaacctgcaacagtgggaactctcgccgggagccctacaccgcggctcataacatgctgctg

SEQ ID NO: 8039 - DNA, 396 bp, Triticum aestivum
  Clone ID: uC-tsrow189029a08b1
tcgtaggaagcagcggagaccacacgaatccccccaccaccctcgcgcccccctcccagcgcggcgccaccaacctcgcctctcccggcgcgccgagcggagccgagcgccgccggagccggcggcgggtctgcgtcaggtccggcctcgtccgtcccgcggaggcggcggcagcgcagcgcgcgctcgcggttggagcttaatcttggttcctgaagctgtagtagggctctgttatggcggggtctgtcgcctcggggttcttccccacgccggggtcttccccggctgcatccgccagaggctccaagaacatgtctggtgaattacctgagtctttgagtgtccgtgggatggttgcaaagccgaacacgcctcccgcgtccatgcaagtca

SEQ ID NO: 8040 - DNA, 345 bp, Triticum aestivum
  Clone ID: uC-tsrow189029a09b1
tgtatgacaccaagggccgcttccgccttcactctgacaaggatgaggatgctaacctcaagctctgcaaggtcaggtctgtccagtttggccagaagggtatcccctacctcaacacctatgatggccgcaccatccgctacccagacccactcatcaaggccaatgacaccatcaagcttgacctggagaccaacaagattgtagacttcatcaagtttgacgtcggcaatgtggacatggtgactggtgggcgcaacactgggcgtgttggtgtgatcaagaacagggagaagcataagggaaccttcgagaccatccacgttgaggatgcccagggccacc

SEQ ID NO: 8041 - DNA, 408 bp, Triticum aestivum
  Clone ID: uC-tsrow189029a10b1
ttttaaatcatggcccagcctctgaggatccgcctatctggtctcagataatgcgcttctttacaaatccccggaagcctatgattctggctgttgcccgtccatatcctgaaaagaatataacaacacttgtaaaggcatttggtgagtgccgaccactgagggagctcgcaaatctcacactaataatgggtaaccgtgaggctatttcaaagatgcacaacacgagtgcttctgtcttgacatctgtgcttacactaatagacgaataccatttgtatggtcaagtggcataccccaagcatcacaagcactctgaagttcctgacatataccgtttagccacaagaactaagggggcttttgttaacgtggcttatttcgaacaatttggtgttaccttgatag

SEQ ID NO: 8042 - DNA, 224 bp, Triticum aestivum
  Clone ID: uC-tsrow189029a12b1
tgccgacctcgacgtcgtcgtcaagcacgatcccttcgagctgaccgtccgccgagctggctcgggcgaacccgtgctctccttcaacttccacggcctcttcgacttcgagccggtgcaggagtcaaagcccgagggcgagacctgggaggagcagttgaggagccacaccgacacgcgcccccgcggcccgcagtcgatcaccttcgacgtctgcttctatg

SEQ ID NO: 8043 - DNA, 260 bp, Triticum aestivum
  Clone ID: uC-tsrow189029b01b1
ttgatcgcgacacactcaccgtctcgccacgtgagaggagaagcccgcagcgccggtgcttgagcggatcgggaaaggatggccggcggcgcggacgcggacggggagcgccggatcggggtggccatggactactcggccaccagcaagcgcgcgctggagtgggccgtccgcaacctgctccgccggggcgacaccgtcgtgtgtctccacgtgcagcgccacggtggggaggacgccaagcacgccgtctgggccaa

SEQ ID NO: 8044 - DNA, 375 bp, Triticum aestivum
  Clone ID: uC-tsrow189029b02b1
ttctttcgtccgccctcacagtcacggaggcgaaggcgacggtttttttctgccctttttaccatggaggcaaccacccaggagcagcgcaggggtgaggatgtggttcatcctctgaaggttagccttgaggaactgtacaacggaacatcaaagaagctctctcttgcccgcaatgtgctctgctcgaagtgcaatggcaaggggtcaaagtccggggcttcgatgaagtgtgccggctgccaaggtgctggttacaaggtgcagataaggcagctgggaccaggaatgattcagcaaatgcagcagccttgcaatgagtgcaggggaagtggggagaccatcagcgacaaggatcgctgtgggcagtgcaaa

SEQ ID NO: 8045 - DNA, 353 bp, Triticum aestivum
  Clone ID: uC-tsrow189029b03b1
ctgatttaagggaaagagaaaaggagtttgttcagaaaaaatccatggagctcgagcacataaattctcaaaaggtgatgatcatgtcaaaactagatcatgttgcgcttgaattgcagaaacttgaggatgagaggaaagaggctaatttggagcgtgaaaagagagagcaagagctgtctgagataaaaaacaccattgaagcccttaataatcaacgagagaagctgcaagagcaaagaaagcttctacattcagaccgagaatcaataacagaacaaattcagcaacttgatgtgttgaaagaactgaaaagcgattttgagaacaagcaactgtctttgatagagtct

SEQ ID NO: 8046 - DNA, 300 bp, Triticum aestivum
  Clone ID: uC-tsrow189029b06b1
gggcgcagtcgcaccatccaccccaaccttcagtgcaggtctgctcatgtctcctcctcgaatccacccctccggaatcactccagtagccgcagccgcagacgattcataggtttctttttcagtactttctttaccaagcaaacccaattcgccgacaccacttaggattcagattagaggcggggaaaagcggaaaaagcagatggagaagacgacagggatggcaggctcccagcccaccgacaccgagtcgttcgagtacatgctgctggagaaggaccccgaccactaccggac

SEQ ID NO: 8047 - DNA, 262 bp, Triticum aestivum
  Clone ID: uC-tsrow189029b10b1
tcccccgccgcgggctagacgcagaccaacccgggaagcgaggcgggtcgccgccgccctagggtttccgatggagcccgcggccccctccgcgtactcggtctcgccggccgcgtcgccggcggggaggcggaggacggcgccggaggccgcggagctgagggtgcggcggcggacgctcgagaccgtgctcgagcagtgccagcgcgcgctcgagctcatgcgcgacgccgagggggaggacggggatccggaggaggag

SEQ ID NO: 8048 - DNA, 180 bp, Triticum aestivum
  Clone ID: uC-tsrow189029b11b1
gggcaacaacaaagagcgcgggagaaataagcggagcacgccaagcagagagagagagagaaggcggcggcggcgacggcgacgactacagcggcggcgacggcggcggcggaggggccgggggaggtgaaccacgcccacagcctggagcagtggaccaagcagaccgaggaggccaac

SEQ ID NO: 8049 - DNA, 332 bp, Triticum aestivum
  Clone ID: uC-tsrow189029b12b1
acctcgtggtgggagtagcccgcaatgggattttttttcctgatgcttttgtcgtgaggcaagaaggacgaaggcatatacaacaattgaacatagagaccgagaaggcgaaaacaaaagcggctcgggcccggcccgatcccggatcttcgccgccggcgacgccggttggagaggtgatgggggaggtgcgcggtgctctatagcagctagtaggtgtagttctagtttttccttagaggagtttggcctagtgccggagattggcgtcatgccgatgaggattttgctgccggcgcgcccgagccgcgttcggtggttcctggcgatac

SEQ ID NO: 8050 - DNA, 305 bp, Triticum aestivum
  Clone ID: uC-tsrow189029c01b1
ttcatgcgtccgctcgccggcatttcctcccacttgcggctgttgcggcggcggcggccaccgtccaccgggtgtggaggcgagatgtcgtacatgcgaggcgatctgctgacgaagacgcggaaactggtgaaggggctggccaagcccgcccctgcctggctcaaggccatggagcaggcacctccagtcacattccctagaactgatggtaaaatcgagaagatagaactgccagaggatgtctatgtcaagaggttcttcagaaggcatcctgattcactctaccatgatgcaataaagat

SEQ ID NO: 8051 - DNA, 276 bp, Triticum aestivum
  Clone ID: uC-tsrow189029c02b1
tttatgtcctctttgagtgtgtggtacagacagtaattttccatggtagcaagagagagtgaaagcagaatggtgaagctcgcattcgggagctgcggtgactccttcagcgccacgtccgtcagggcgtatgtggcggagttcatcgccaccctcctcttcgtgtttgccggcgttgggtccgccattgcctatgggaaactcaccgatgatggcgcgctcgacccggctggccttgtggcgatcgcgatcgcccacgccttcgccctcttcgtc

SEQ ID NO: 8052 - DNA, 401 bp, Triticum aestivum
  Clone ID: uC-tsrow189029c06b1
tttctattttgatggatatattacaccagagaccacaataaagatattcattgaacaatttgatactgctatgaagcttaggtccgatcgagaagcctatgatgatttccgttcttttcagcaaaggccacaagccctctctggtctgttgtttgaggagcaatttgcaaatgcttatacgataaatattttccagaagttccaggatcagttaaagcagctgatgaatgtgacttgcactgaagtcagtaggaatggatcgatagtgacctacactgtgaccgtcattgggaaggagaggaagtttgactatagagtgatgtataatagtgccgagaaagaagtgtggtgtatctgcagatccttccagtttaaaggtattttgtgtagccatgctcttg

SEQ ID NO: 8053 - DNA, 274 bp, Triticum aestivum
  Clone ID: uC-tsrow189029c08b1
cttgcgaggaggggggctgtttaacggaagcaggcggtatttaggagatcgagccagagggcggcgagcaagggcgcgatggcgtccaagaggatacagaatgagcttaaggatctgcagaaggacccccctacctcatgcagcgcaggtcctgtgggtgaagatatgttccattggcaggcaacaataatgggcccatctgacagcccatattctggtggagttttcctagttactatccacttgcctcctgattattctttcaaaccaccaa

SEQ ID NO: 8054 - DNA, 257 bp, Triticum aestivum
  Clone ID: uC-tsrow189029c09b1
accaccacttcctcgtctccggcgagcctctgatgaagggtcgcagccgtcggcggggcgaccgccagctccagttccagctcctgcaccgccttctcgcgctctcgtcgctgctcctcctcgcctccggagaggtcatcttcgaggagcgattcgaagatggttgggagactcggtgggtcaaatccgataggaagaagagcgaagggaaagccggtatgctcaagcacacggcaggaaaatattctggagatcct

SEQ ID NO: 8055 - DNA, 389 bp, Triticum aestivum
  Clone ID: uC-tsrow189029c12b1
tcttctacgcgtccgccacgagcaacacgcagccacatccacatcccattccactccacggtgaggttgagcgatccgactagcccttcagcagcaacgacggcaggtttgttctctgaacttctctggtctttttagcggcagccagcaggaacacacaagaaattcaggtcccgttcaaggggtccttcttctgggattattagatcggaagaagcgccctcctcttgctcgggattctcctgatttcttgctaacctcactactctcctaggaggaacagagagatccagagaaccttttttctctcctggattcttgccttttttcagccttgttttgctccggtacggcgagaaagggttcttttgcaatacccttctagttcg

SEQ ID NO: 8056 - DNA, 300 bp, Triticum aestivum
  Clone ID: uC-tsrow189029d01b1
ttggttggcaacggagccatcgtcgagaaggacccgctcaactggggcgcggcggcggccgagctcaccggcagccacctcgacgaggtgaagcggatggtggcgcagttccgcgagcccgtggtgaagatcgagggcgccagcctccgcgtcggccaggtggcggccgtggcccaggccaaggacgcgtcgggcatctccgtggagctcgacgaggaggcgcggccccgcgtcaaggccagcagcgagtggatcctcagctgcctcgccggcggcggcgacatctacggcgtcaccacc

SEQ ID NO: 8057 - DNA, 408 bp, Triticum aestivum
  Clone ID: uC-tsrow189029d02b1
ttatcgtccgccacgcgtccggttcggcttttcgtcgacatatctgtcccgaggaatgtcggtgcctgtgtatctgaggtggagcatgcacgggtatacaatgtcgacgacttgaaagaggtggtggaagccaataaggaagaccgtgtgaggaaagcaatggaggcccaaacaatcattacccaagaactgaaacggttcgaggcatggagggactcactggagacggttccgaccatcaaaaagctgaggtcgtacgccgacaggatcagggcatccgagctcgagaagtgtctgcagaagatcggggaagacaatctcaacaagaagatgagaaggtccatcgaggagctgagcacgggcatagtgaacaagctccttcacggcccactgcagcacctgagatgc

SEQ ID NO: 8058 - DNA, 198 bp, Triticum aestivum
  Clone ID: uC-tsrow189029d03b1
ccggtacgccttgttgaacgggatgccggcgttcgagtaccacggcacggacccgcgcttcaaccgcgtcttcaacgaggggatgaagaaccattccatcatcatcaccaagaagctcctcgagtcctacaagggcttcgagggcctcaacgcccccgcccacgtcgacgagggtgttgaggccctcgaagcccttgt

SEQ ID NO: 8059 - DNA, 397 bp, Triticum aestivum
  Clone ID: uC-tsrow189029d04b1
ttctatcccctcatcgcctccgctcccacgccgccgaatccgagacctgatctcggattcaccgcgaccagaccctcaggcgatccccggcacctcctccccgacgcttcagccatggcaggaatggcaccggaaggttcccagtttgacgctaagaactatgattctaagatgcaggagctgctgaaccaaggtgagactgaggagttcttcacctcttatgatgaagttcacgagagctttgatgacatgggtctccaagagaacctcctgaggggaatttatgcttatggttttgagaagccttctgccatccagcaaaggggaatcgttcctttctgcaagggccttgatgttatccagcaagcacaatctggaacaggaaagactgctactt

SEQ ID NO: 8060 - DNA, 249 bp, Triticum aestivum
  Clone ID: uC-tsrow189029d06b1
gggtcggcaacaaatacactatagtggcttgttttgacagcgtttgggcgctctcaatggcgagccgtttgggagtcgtgctggctttagcggctgtcgtccttcttgccgcagcgggggccgtcgtcgggcaatccacgccacggccacccaacgcccagggcccgaagccgtagccgaagccgatgaaggtcaagtgcactgagaaccgcaaggagaacccctactgtttcaaccggaacatggact

SEQ ID NO: 8061 - DNA, 277 bp, Triticum aestivum
  Clone ID: uC-tsrow189029d09b1
ctccacagaccacgcccaccgcaccgcaccaactatggcgatggctgagcagcagcggcggcgcaggcgcactggatctggccttcgttaccgtcgccgtactgctctccccggccctgtccgcacctctggacggcgccggcttccactcggcgacgtgcccgcagctggagagcatcgagctgtcctccgtccaggcggcgctccagcgtgaggtggcgctcgccgccggcctccttcgcatcttcttacacgactgcttcccgcagggctgcga

SEQ ID NO: 8062 - DNA, 405 bp, Triticum aestivum
  Clone ID: uC-tsrow189029d10b1
ccagcctgcttgcacacgccaccggcgtcgtttcagcccctccatggccgccccggcgccggaggagtgcctcgacgtgctcaccgccgccggcgacaagacgggcgtctccaagcccaggtcggaggtgcaccgggacggggactaccaccgcgcggtgcacgtgtggatctactgcgagagcaccggggagctgctgctgcagcgccgcgccgactgcaaggactcgtggcccggccagtgggacatctccagcgccggccacatctgcgccggggactcctccctctccttcgcgcggagggagctccaagaagaactaggcatcaagcttccagtcgatgcttttgagctcatcttcgtttttcttcaggaatgcgtcatcaacattgggacttacaccaa

SEQ ID NO: 8063 - DNA, 342 bp, Triticum aestivum
  Clone ID: uC-tsrow189029e05b1
gcggacgcgtgggaggcgccaccacccttttttggacccctacaaggcctaccacgccaacgggtgcgtgcacgacaaggccaccaacaagacggcctgccccgccggcagcgacgcctggatgcgccgcgagctcggcgaggaggagctcaagaccgtcgcctgggccgagcgcaactgcctgtactacaactactgcgccgacggctggaggttccccaagggattccccggcgagtgcggacgcgacctatgatgaattgatgattcagtgtttgtagcactagcagtacacctccgagccgagatttcattgattaatttcttcctttgctacagtac

SEQ ID NO: 8064 - DNA, 339 bp, Triticum aestivum
  Clone ID: uC-tsrow189029e07b1
tcgtcttcctcggttcctccaacgaacacaacacccgattaactagcactagcagaggcttatcccagtagccgacagggggtttgagagcgtacagcggggtcaatcgatcgagcgccaagaatggcggcgtcagggagcgctcagagccgactgttcgccgcagcgtgcggcgttctcagccgctgcatcaaggcggcggacgcgcggccggcggccacggtggtcctccccctcatgcccggagcggaagtgcccgcgcaagacgagcacacggtgggttctgcgccggggcacgcgcagatgaccatcttctacggcgggcaggtgctggtgctg

SEQ ID NO: 8065 - DNA, 388 bp, Triticum aestivum
  Clone ID: uC-tsrow189029e08b1
gactgtccgagcaaggaaaggcagggagagatggcattgaggccgctcgtcgtgctcgccctggccgaggcgctggccggcgtggcgctgggagggggcgcggccgagggggccggcgagtgcgggagggcctcccccgaccggatggccctgcgcatggccccgtgcatctcggcggcggacgagccggactcggcgccctccagcagctgctgctcggcggtgcacaccatcggcaagagccccagctgcctgtgcgccgtcatgctgtccggcaccgccaagatggccgggatcaggcccgaggtcgccatcaccatccccaagcgctgcaacatcgtcgaccgtcccgtcggctacaagtgcggagattacacgctgccttgat

SEQ ID NO: 8066 - DNA, 426 bp, Triticum aestivum
  Clone ID: uC-tsrow189029e09b1
atcgtgagatggtgctgcttgagaattacagcgccctcaactacaccgggctggtgaagattctcacgaagtatgacaagagaactggggctcttatccgtctgcccttcatccaaaatgtgctgcttcagcctttcttcaccactgacctcctgtacaagcttgtgaaggagtgtgaggccatgctcgaccagctcctgccatcaagcaaaccatctgtatcaattgaagagggaaaagaagatggcaacactgcggaccagcatctgaaccccagttcttccttggctaacagcagatgtattccggagcttgatgagattgagttcatggagagcatgtacatgaagagcacggttgcggcgcttagggctctgaaagagatccgaagcaaaagctccacagtcagtgctttctcgttgccac

SEQ ID NO: 8067 - DNA, 357 bp, Triticum aestivum
  Clone ID: uC-tsrow189029e10b1
tcgtcatccaattccctcactccaccgccgctccttctcggtccttccccgcctcctcgcattgcagggaggagactcaatcaagatgccgaccatcatcatcaaggtggacctggattgcgcccgctgccaccgcaagatcgagagggtgctcgacaggatcagagagaagggcgagttcgtcatcgacgacatcgagtacgatgagaagaacaacaaggtgatcgtgaagggccccttcgacgccgacaagctctccgacaagctctgctgtaaggcctgcaagatcatcaaggagatcgagatcgtcgagccgccgccgtcgtcagcgccggaggagcccaagaaagaggcgcc

SEQ ID NO: 8068 - DNA, 302 bp, Triticum aestivum
  Clone ID: uC-tsrow189029e11b1
tccacctgcacctgcaagcgctggttaccttcttcctcccccggcactcgacctctccgctcgctgccttccaagagtgccgctaccgttggcgaccagaccagcagaggaacgccgctggcagaggatgaggagtccttccttctccaccatgaagcacgcctgcttccactcctcgccgccgaagtcggatgcgtgcgcagatgcagttgaaggaaaggggcgggcctcaaggccggacctcaaggagatgcagcaccggaacatcatcaggctgcaggacgtggtgcataacgagaaga

SEQ ID NO: 8069 - DNA, 314 bp, Triticum aestivum
  Clone ID: uC-tsrow189029e12b1
gtcgttgacgcgtgggctcaccccgaacccccagctgcccttcccggcgccgccgcaacagcaagatggtgaagggacgcaccggccagcgcgtgaggctctacgtccgcggcaccatcctcggatacaagcggtccaagtcgaaccagtacgagacggcgtcgctggtgcagatcgagggggtgaacaccatggaggacgtggcctggtacggcggcaagaggatggcctacgtctacaaggccaagaccaagagcaacggcacccactaccgctgcatctggggcaaggtctctcgcccccacggcaacacc

SEQ ID NO: 8070 - DNA, 365 bp, Triticum aestivum
  Clone ID: uC-tsrow189029f01b1
tttaatcgccatggcggcgccagcaccaacggcaaggccaatattaagaagcacggccacggcggcagcagctggttcatgctgcacatgatgccgtccttgtcgtcgtcgcgggcatcgtccaacgtaccctcggagaagggggacggcgacgaaagcgaggacgacgacgacgaggtactcatccccggcctgccgacccggttcacgttcgtcgacctggagacggccaccaacggcttcaagtggcagatcggctccggcgggttcggcttcgtgtaccgcggcgagctcccggaccggaccaccgtggccgtcaagcggatgaacaacctgtgcatgcagggccggcgcgagttcctcac

SEQ ID NO: 8071 - DNA, 259 bp, Triticum aestivum
  Clone ID: uC-tsrow189029f02b1
ttacttgcctatattgacgtagacgcagcaggagcagcagcagcttaactctgtcagttctctagcatctccggtgaagcaagcaagcagagagatggcgtcccctcgtcgcatggccgccgcgcccgccgtcctcctcctcgtcctgctcctactcgtcgccacggagatggggacgatgaagactgcggaggcccggacgtgcctgtcgcagagccacaagatcaagggcacctgcctcagcaacagcaactgcgcc

SEQ ID NO: 8072 - DNA, 247 bp, Triticum aestivum
  Clone ID: uC-tsrow189029f03b1
cggcgatggatttcgagctgttgtttgcgcgggagaagctggattgggagcagcgggagcggatgcagcgcgctaaggccaaagccgaccgcgagcgccgcgccaaggccgaggccgcgcgccgccgcgacgcgctcgaggcctaaaacagggggcgccgcctcgacgccgaccgggcgcaggaagaggctgaccagaaaatggaagaggtgatgcaactaggaaaggggatctttttttcacacat

SEQ ID NO: 8073 - DNA, 387 bp, Triticum aestivum
  Clone ID: uC-tsrow189029f04b1
tgcccgaacggtctgtgtcaatgaatggatggtgccttgctttccgagcctgtggtgaccggctgattgtcattggaggcccaaggacttctattggtggcatcattgagcttaattcatgggttcccgatgggcaaccgcctgtgtggaatttggttgccacacggcaatccgggaactttgtgtataactgcgccgtgatgggttgctgagtccactgaataaagattggatgcagtggatatttatgaaggatgatagtatgcacaaaggcagcccgttcaattgctccagccctgattcttcgtagcgatttatgccttctgcccagttaactggacatctgctgagcggcagcactcatgtaacccttgagttctaatactt

SEQ ID NO: 8074 - DNA, 141 bp, Triticum aestivum
  Clone ID: uC-tsrow189029f05b1
ttcatgcgtccgcggacgcgtgggtacaaactaagcagatgcacagctgagctgccggatcaccggcgcaacgtacacgcctacatcatgtatatacagaattacagtatattgttcagaaaaaaatcaacaaattgttaa

SEQ ID NO: 8075 - DNA, 358 bp, Triticum aestivum
  Clone ID: uC-tsrow189029f06b1
cccgaatcaagctgccatcagaccatatgtttcaaattgcacggtgtgagcattgaatatcccgaacacgtctgcagaccggcgtaggcccgctgatgccggggaagaagttggcgcatcatcagcgctgcatgatcaatcgttgcaggtgggaactgtcttcaaggcgcgcagatctcgaaataggttctcatccccctctatagataaagcagcggtcaacacgcacagatggttgaacaacgctgagatcatggtcatggaagagaacatggaagactcgggcggtattagacactctcatacagattaatattgaccacctgcttaattagttaatacattgtaacaccccctc

SEQ ID NO: 8076 - DNA, 338 bp, Triticum aestivum
  Clone ID: uC-tsrow189029f08b1
tcgtatctgccagccacgaactccggcgactccacgacaagcttcccgagcagcccgccctcttcgaccaccgtcatgtagaggcgcggcgactggggctacgagaacaacggcgggacctgcgtggccatcgccggcgcggactactgcggggtcgccagcgacacccgcctatccgtcggatacaacatcctgacgcgcgagcactccaagatctgcgagctggccgaaaaatgtgtaatagcatcttctggctttcaaggtgacatcaaagctgtacagaagaactcagctgccagggaactgctataccaggaccagcacaataaaaggatgag

SEQ ID NO: 8077 - DNA, 393 bp, Triticum aestivum
  Clone ID: uC-tsrow189029f10b1
tctctccatctgactcagttttttatccgacggcatggtcgttcccgcacccgccaagaggagaagcagcggcggtggcggaggcggggagaagaaggatctgttccacgtcgtccacaaggtgcccgccggcgacagcccctacgtccgggccaagcacctccagctcgtggagaaggacgcggaggcgtcggtcgtgtggttctggaaggcgatcaactccggggacagggtggacagcgcgctcaaggacatggccgtggtgatgaagcagcaggaccgcgctgaggaggcgatagaggccatcagatccttcaggcacctctgctccaggcaggcccaggagtccctcgacaacctgctcattgacctctacaagaaatgtggaaaagt

SEQ ID NO: 8078 - DNA, 333 bp, Triticum aestivum
  Clone ID: uC-tsrow189029f11b1
tgcagttgagtttggatctctacatcatcttaagttattgtagtcgcatgttcacgaaggaaacaaggcttaaggaagttaattctgttgggatgaaagattgggctaatattcagactgatattgttggtctaattataaagaagcttggcattcctgactacatcagattccgtgctgtatgcacgtcatggaaccatatctgcaaggaagtatccaaccatccaagggtggacccatggctgatgctccccacaaagccgcttgatggtgctaagttttttagcttacctgaaaaaaagactcaaaccatgcatatcccgagtgttgcca

SEQ ID NO: 8079 - DNA, 459 bp, Triticum aestivum
  Clone ID: uC-tsrow189029f12b1
ttgtttacgcgtccggaagaggggagggggggactagccggctagcgtgtggacgggtgcggctctcggctcgccacgcggagacggcacgagccccgatgccgtcgccccgccgcgccggcgcgggcgacacgagcgccttcttcgcggcgacgctggtgctgtgggccgtgtcggtggggttcgagatcggcgcccggggacgccgcgagctggccgccgtggccgccggcttcgccttcttccaggccgccaacacggccgtccgcgccgcggtctcccgcgacccgctcttcgtcaacaccgccgtctcgctgctccactcctccctcacctgcgcctcagttatctttgttctattgtgccaatggcgtaccaaaggccttgagaacatgtttcagcatgaagaattagttggtagcagttggattggagcatattctgctctgtgcttttcat

SEQ ID NO: 8080 - DNA, 265 bp, Triticum aestivum
  Clone ID: uC-tsrow189029g01b1
gagtgatagctctaaagactcctcctatagtggtatcatcggtatcaccagaaaaagagaaatgagaacctgtggcaagacaaaggtagtgtcgccaggccgccgtacccggtggcctggcgtggttgtgtcgcgtctgttttcggtatttgggggggttttgagtaagtactatgtgttgtgttcgagtgttgggtgagtggatctgaaagtgggttctagattggagctgttttcgcgtcttattaagattatattacaacag

SEQ ID NO: 8081 - DNA, 217 bp, Triticum aestivum
  Clone ID: uC-tsrow189029g02b1
agcggcgcacccaccaaccacccccacccgccgccatgagggagagcatctcgagccacaacggccaggccggcatccaggacgggaacgcgtgcagggagctgaactgcctcgagcatggcagacagcctgatggccagatgcccggagacaagaaccgcgggggaggtgatgatgctctcaacacctccttcagcgagactggggcagggaagca

SEQ ID NO: 8082 - DNA, 360 bp, Triticum aestivum
  Clone ID: uC-tsrow189029g03b1
ttgatctggagcacccggagcgcccgaccaagtacggcaagtactggtgctggtgcttctggtccgtcgacgtcgaggtgctcgacctgctcggggccaaggagatggccgtgcgcgcctgggacgaggccctcaacacccagcccgagcgcctcatctggaacctcatgggcatgatgaacaactgctggttccgggtcaagatcaacgtctgccgcccccacaagggcgagatcggcctcgtattcgaccaccccacgcagcccgggaaccagtccggcggctggatggcgcggcagaagcacatcgagacgtccgagaccacgcagggcacgctcaagcggagcacctgcacgccct

SEQ ID NO: 8083 - DNA, 414 bp, Triticum aestivum
  Clone ID: uC-tsrow189029g04b1
tgtgctttcttttgcatcatttagtgtggccaataggacaataatggcgttatggaaagcaagatcattgagctccgagtctaaagtacagattgctgaggaacaatctcaaaataatacacttcagagtgaggacagtggaatttttgttggtgttgacgattccaagagccttcagatgagtgaagttttctcgtcaaccatttctgctaatatgaattcacttctggaggtgttcgagggtggttcgttggagatgaaagtcatggaaaaagttggatgcctcaaatactcggctacacaatgggaatcagataaacccgacgaatatcaaagacaaattcattacaagtttagcaggaagttgtctcctgttggaggagaagtgactgggacccagctgaaatctcctat

SEQ ID NO: 8084 - DNA, 212 bp, Triticum aestivum
  Clone ID: uC-tsrow189029g05b1
gggccatctccgagctggcgcgcggagccgacgcgccctcggtgccaccggtgtgggggagggagatgctcatggcgcggcagcccccgcagacgtgcacctacccggacctggagtaccgagagcccgcgggcgggctggagccggacccgatgctcacgacgcccccaggcgacaaggggtgcgtccccttcttctttggggcacgggag

SEQ ID NO: 8085 - DNA, 394 bp, Triticum aestivum
  Clone ID: uC-tsrow189029g06b1
ttctttgaggttgtgctaactcccacacatttggccatagttatggaatacgctgctggcggtgagctatttgaaaggatctgtggttctggaagatttagcgagaatgaggctaggttcttcttccaacaattgctttcaggagttagctattgccattccatgcaaatatgtcatagagatttgaaactagaaaatacgctcctggatgggagcgaagcaccccggctcaagatatgtgatttcggttactccaagtcctctgtgttgcactctcagccaaaatcgaccgtgggtactcctgcctacatcgcccccgaggtcctttctagaagggaatatgatggaaaggtcgctgatgtttggtcctgtggagtaactctatatgtgatgc

SEQ ID NO: 8086 - DNA, 328 bp, Triticum aestivum
  Clone ID: uC-tsrow189029g08b1
ccgcaacggcaatggcaggccaggcagtgaaggtgtttgtccccaccgacacggagctgctccaggcgcagtcggacctgtggcgccacaccctctgctacctcacgcctatggcgctccggtgcgccgtcgaccttggcgtccccactgccattcaccgcctcggcggcgccgcgtccccatccgaactcgtcgccgccctatccctccccacgtccaagctgcccttcctcgcccgcctgctgcgccaactcgccacggcgggcgtcttcagtgcaaccgacgccggaacgtaccgtctcaacccgctctcgtacctcctggtaga

SEQ ID NO: 8087 - DNA, 419 bp, Triticum aestivum
  Clone ID: uC-tsrow189029g10b1
gcctacgtttctttctctctccctctccctctccctctccctcttccctcggctagcaaggcgtctctctcttctccagggaggctctcgatttgcatggacaagggccacctcggtggcggcggaggaggaggaggactgctcgccctggacgcctcgccgcggcagctcggcttcctgaacttgctatcaccggcgccgttccacaggagcatggaggcggacgacggcggcggtggcggcggcggcagggggaggaggtccatcgaggttgacttcttctccgacgagaagaagaacatgaagaagagccgcgcatcggccggtgctgacgcggaggaccacaaggatcaggcctccgccgccgactcgccatcaagaaggaggacctcaccattaacctgcttaccgggaacaac

SEQ ID NO: 8088 - DNA, 426 bp, Triticum aestivum
  Clone ID: uC-tsrow189029g11b1
tcgtttcacgcgtccggagaatcgccacatcgctcgctccctccttcctctcctctccctcccgatctggaagaatcgaagagacatgagaatcgacgcatcgcctcatgcgcatccgcccctcccgatccttttcggtccacgatcgctagcagagggatcccctcgagagaggaggacgagcgatcggtcttgctgatccgtcggtgcgaaagggaagatgagggcatctggtcgccgcgactttgaggaccagggatcggtcagcttctcggctccggcaagccgatgctctgcaggaaacacaaaggtccgtcccgcccgccattgcggaccaggcctcgggcaccgaccctcgatctcttcttcctcgtcattccgggactcgcaattcactgacgtcgaccttactggccacctggcaca

SEQ ID NO: 8089 - DNA, 411 bp, Triticum aestivum
  Clone ID: uC-tsrow189029g12b1
atcgttcatttatggatatctcggaggtttccttcttgaattcggacgtgggttttctcgcctgaggcgggatcccatattgcgaaattggagcacgattcgattgagaaaggtctcctgtatcacatcccctccaaggtggtgtgtccggagcagcagagtgtcgatgtgatgatgaacgcactgcgcgaatatttcttctatggtcgtgaggtcttcgaagagcgtcgcgagaaattcctggcagtgattgtgaactgcggcttggtgccgtacctcacggaagtgccagcgtacgatacacttgttgaacaatatttggcatccagtgccaagtatgctccgggtggtcggtgcgaacaatgcagtgcttaggcgctgcgcgtggggcctaccttataaggtcccttc

SEQ ID NO: 8090 - DNA, 105 bp, Triticum aestivum
  Clone ID: uC-tsrow189029h01b1
tcctttcgtgcggctagctcttgccccgcggcgcccgatcgagcctgggaggagactcgaaccctaatcttccgcctcgatctgtcccgccgcaggagagatccc

SEQ ID NO: 8091 - DNA, 363 bp, Triticum aestivum
  Clone ID: uC-tsrow189029h03b1
tgcgtcatccgcagcagagaactccagggaattgaagctgggatcggaaaaaggtcggtcttttgccattttggccgggagcagaggagggaggagatggccaagggggagagggaggggcgcctccccctcttgctgctgctgctgcttgtcttgtgcctcttggcccagtccaggatcgccgtcgtcgccacccacccacaggatgcggctgctctcaaatccttgatgaggaaatggtcaaatgtgcctgctagctggaggaagaaatcgaatgatccttgcggcgacaaatgggatggaattgaatgcaatggtgccaactcaagggttacatcactaaatctttttggcatgaacatg

SEQ ID NO: 8092 - DNA, 423 bp, Triticum aestivum
  Clone ID: uC-tsrow189029h04b1
ttcttgcgtccgcggacgcgtgggcggcggcggcgccgatagctgacaacatggacgaggacgacgaggacgaggacgactacgaggacgaggacgaggaggacgacctcgacggcaacaaaacgcagtacaagatccagttccaggggcagcaacaacatcagaatcagcatcaacagcaccaccacaacgttgtcaggccgaacgccacctcgtgcggcggcggcaacccgcctggcgctgccgctcccagcgcgccggcggcggcaacgacgacagccggatctttcctgggcatggtccagtagatccatccatcaccccggtgactagctctctctctccccataccccaatcaattccatcggtggctttctaccttctctttctctctttcttggaccatttgtatctacctacct

SEQ ID NO: 8093 - DNA, 315 bp, Triticum aestivum
  Clone ID: uC-tsrow189029h05b1
tgggtgcagatgaagtggcggcaaaatgcatgatcatgatgtgcttttgaccctgtagttatacagatgtagaaccggctgttgagagggtgctgtgctgagttattatttgtttggaggggacgttgcatacagcggatgtattgtagcttgtcgaaaggaaagtaacacttggtttgttgtacagggatttatagaacttttttgcttagatcaatttcactttgtaagctgtatattttgcagcgaatttctgcatctcggttgattctgtggtcgttgccttagctataaaatattctgtgcgactcgttc

SEQ ID NO: 8094 - DNA, 493 bp, Triticum aestivum
  Clone ID: uC-tsrow189029h06b1
ttgccctatctgccttgaagaatatgatgaagataatccccgctctatcaccaaatgcgagcatcatttccatctttgttgcatactcgaatggatggagcgaagcgagacttgcccagtctgtgaccagataactttgatagatgagatgtatgaatagcatgttgaccctggtggatcctctctaggagcccgtgcgtgcctaccgaggaggtttagtactagtccttttctctatggggaagtaaaatcagcaaactactctgctcctaatatgatagtatgatctggtggaggaggtgctactggaatgcatcttgggagaacaaatgggaaataatgaaaggaaggaacccgcaagaaatatgctctaaaaaaaccatccatccctgtgtttatactagcatttgtgtcaagtttatggtaacaggaggattagcaggctgcatctgcaatatgcacttcatactagtcgaaactctgaatctagctc

SEQ ID NO: 8095 - DNA, 319 bp, Triticum aestivum
  Clone ID: uC-tsrow189029h07b1
acagcaccaaccagcaccacgcctagcttacacccaagaacggcggctgccagccagcaaacagacacgaggctcggggccggcccaatcattcccatcatcccatggaccgatcggctaccggcgggagagggtactactactcggcggcgccggtgggcacgggcatgggcatgggcccgctcgcgggccagctcggcgagtggctgctccgggccgtgcagccgccggcgcccacgccgtgcgggtcgcccggcgggcccccgatcaccgagccgtgggtccggatgagggacggccggcacttggcgtacgagga

SEQ ID NO: 8096 - DNA, 420 bp, Triticum aestivum
  Clone ID: uC-tsrow189029h09b1
ttgcgatctcaccgagaaaatcctcgaccgaccgtacgacaaggccctctcatcctccttctccaagatgcagatcttcgtgaagactctcaccggcaagaccatcacccttgaggtcgagtcgtctgacacgatcaacaatgtcaaggccaagatccaggacaaggagggaatccctccggaccagcagcgcctcatctttgctggcaagcagctagaggatggccgcaccctggctgactacaacatccagaaggagtccaccctccacctggtgctccgcctccgcggaggcatgcagatctttgtcaagaccctcaccggcaagaccatcaccttggaggtggagtcctcggacaccatcgacaatgtgaaggcgaagatccaggacaaggagggcattcccccggaccagcagcg

SEQ ID NO: 8097 - DNA, 458 bp, Triticum aestivum
  Clone ID: uC-tsrow189029h10b1
tcttgctgctcgcaaaggcgaggagggtgcggtgcctggtccagatctcgtggccgccatggcggagcagttcgcggagtcagcgaacaatgtaatcatcgaagaggtgaacaagggcctgaaccctggaatgatagtcctgcttgtggttgcgaccaccctgctgcttttctttgttgggaactatgcgctgtacctgtatgcgcagaagacgctccctccgaagaagaagaagccagtctccaagaagaagctcaagagggaaaagctgaagcaaggggtttctgcaccaggggagtgaagagacccatcgatttctcatgtcgattgctttatgctgggctcctttttttacctgataaaaaatatataccagctggagctgcagtgttgagcgactgtttatgtagaagccttgtcttgagtggtacatcgtcggtattggacaccttatttaa

SEQ ID NO: 8098 - DNA, 199 bp, Triticum aestivum
  Clone ID: uC-tsrow189029h11b1
tgccggcaccaccccttttcttgcggagcagcgtgagggtttcggaaagctaagccatggcggagcagccgcacgccgaggacgcgggccacaagccggagaccctgatggagaagatcgccgacaagctccacgtcggcggcggcgaccactcctgctcgtcctccgactccgacaaggaggagcagccgtgcccctc

SEQ ID NO: 8099 - DNA, 424 bp, Triticum aestivum
  Clone ID: uC-tsrow189029h12b1
acctcggacgcgtgggcaagctcatcgaagagattatgattggggaggacaggctgattcatttctccggggttgcgatggggcaagcatgcaccattgtcctgagaggagcaagtgagcatgtgcttgatgaggctgagaggtccttgcatgatgccctatgtgtgctttctcagacagtaactgacacgcgtgtcatatatggtggtggatggcctgagatggtgatgtccaaggaggtggatgaacttgcaaggaagacccctgggaagaaatctcacgcgattgatgccttttcacgcgccctgcaagccatcccaacaatcattgctgacaatgctgctctggatagtgctgagctgatctcccagctccgagccgagcaccacaaagtgaacagcactgctggaattgatgtcatcag

SEQ ID NO: 8100 - DNA, 242 bp, Triticum aestivum
  Clone ID: uC-tsrow189030a01b1
tgtggttctccgattctcctacgcggagttggaccaggcaaccggaaaattctccgacgaacagctcatcggcgtcggtgggacgagcaaggtgtatcgtggccagctcgctgatggcaaagtcgtcgccgtgaagaagcttcggcccctcggcggtgcggacgaagactatgagttcctgtcagagatagagctgctgtcgcggctgaaccactgccacgtggtgccattgctggggtact

SEQ ID NO: 8101 - DNA, 147 bp, Triticum aestivum
  Clone ID: uC-tsrow189030a04b1
aaaagaaacctcagagccttatggttcatacggccatgaaaatcgtaaggaaatatcggcaacatatggatcaaaggaccaaggaattcgcaaggaagcatcaggatcctacgggctaaaaggtgaaagggatttaaaagaaatctc

SEQ ID NO: 8102 - DNA, 308 bp, Triticum aestivum
  Clone ID: uC-tsrow189030a08b1
tctcctagctcattcttcaaagttcaaacacatattttctgtctctactctccttcctcattgcccataagctcctgcgtctgtgttcgtcctcttgcgacgctaatggcgtgcctgtcctcctcgccgtccggccggcgcctgtcggagctgctggaggagaggcaggagcccttcttccttgacctccacctcctggagaagggctgctcgggctggctcctcgatggctatgacaccgccctgtgctggccagccgcagccgccggcaacgacgcggcgtccgtgctcaagcgactcaccagcaa

SEQ ID NO: 8103 - DNA, 393 bp, Triticum aestivum
  Clone ID: uC-tsrow189030b01b1
gtttttcaaagaattcattgaattgaggcgccaagctctggacctattcatcaacagactagcttcacaccctgaacttaagcaaagcgaagatttgaggacatttttgcaggcagatgaagagaaaatggatagagcaaggtcttttgagactggtatatttaagaagccgggagatttcatacagatgtttaaggatgtacagtcaaaagtcagcgatgttgttttgggaaaagaaaagccagtggaagagtctactcctgaatatgagaagcttaaacattacatatttgagctagaaaatcatctagcagaggcccagaaacaagcatttcgccttgtaaaaaggcacagagaacttgggcaatctttggcggactttgggaaagcgat

SEQ ID NO: 8104 - DNA, 65 bp, Triticum aestivum
  Clone ID: uC-tsrow189030b02b1
tcggtttcctccaccgaccaccatgccgacggacggaagcgtcaaggatattcacctccgcctcc

SEQ ID NO: 8105 - DNA, 133 bp, Triticum aestivum
  Clone ID: uC-tsrow189030b04b1
tcaggttaactaggagggaagaggagaggtgaggagggagtgtggtgatgatgatgatgaggtctctagagccggcggccgaccacaaggcctcgtcatccttcggcaaccttctctccatctttctccgggt

SEQ ID NO: 8106 - DNA, 150 bp, Triticum aestivum
  Clone ID: uC-tsrow189030b05b1
gatgaagcagagcggcatggagagcagcctggcggcgcgacaggcgccgggcagctacggcctgccgttcgtctcggccatccgcgaccggctcgacttctactacttccagggccaggacaagtactttgagtcccgcgtccacaagta

SEQ ID NO: 8107 - DNA, 205 bp, Triticum aestivum
  Clone ID: uC-tsrow189030b06b1
gcaatcttgtctacagcgagagggagatccattccaaaccaaagtaccctagctagccagctagcagtagcagtgttggatgaagcagagcggcatggagagcagcctggtggcgcggcaggtgccgggcagctacggcctgccgttcgtctcggccatccgcgaccggctcgacttctactacttccagggccaggacaagtac

SEQ ID NO: 8108 - DNA, 150 bp, Triticum aestivum
  Clone ID: uC-tsrow189030b10b1
cccagatccactttccctcctttcgctcgtacgctccttctcctccagcgcggcccgaccgctgctatggtcgccggtgtgcaccaccgcggtgagctcctcccccactccccttcgacgtgcccacgacccgcgccatcgtcgtccacg

SEQ ID NO: 8109 - DNA, 131 bp, Triticum aestivum
  Clone ID: uC-tsrow189030c01b1
gtttcttcgtgggcggcctcgcctgggccaccgacgactacatccttcaacaggccttcagccagtacggcgtgatcctcgacgccaagatcatctacgaccgctagacggggcggtcccgtgggttcggc

SEQ ID NO: 8110 - DNA, 234 bp, Triticum aestivum
  Clone ID: uC-tsrow189030c02b1
tgtaccacccgagcacgcacgcacgcacgcacgcatcactctcctctcaggagcaacggcggccgtgcctgccacgcgcgcgcgagcatacacatgggagaggtcgcctccaccgcagcggcggcgtcgctctcgtcgtcgtcctcgctgctgatggctgcgacggccgtcaagggggacgaggagcggtacgtcatggtggcgtcgaggttcttccgggtgaagccgggcgct

SEQ ID NO: 8111 - DNA, 316 bp, Triticum aestivum
  Clone ID: uC-tsrow189030c08b1
gaactgctattccagtggaaggacggtttgagcatattgtgccatcgtgcagcaccactgctgatcatggcattattcggatagagcgagaatcagccttggctctagagctaatgaaggaaaaagagaaggcaacaactccacctgctgaacaaaagacggagagattgcaaagtttcaaggaagaacacaagaatgcgctccacagggcgaaaaccttggatgttcctcatgcgatagacatctctgaagaggaaacccatgagggcgcttcatcttccgatactcacagcgaggcgacttcatcagaaccaaa

SEQ ID NO: 8112 - DNA, 228 bp, Triticum aestivum
  Clone ID: uC-tsrow189030c09b1
tacaagcgttcaacaccggcaacctagctctctaccaagagctttgtggggttcacaatgctgctcttagtgcacagcctgcattggtgcagaatgaacagaaactgcttgagaagatcaatattctgtgtctgatggagataatcttcagccggccatcagaagatagaactatcccattaagtgttattgccaagcagactaagctttcaaccagcaaagtggaat

SEQ ID NO: 8113 - DNA, 249 bp, Triticum aestivum
  Clone ID: uC-tsrow189030c11b1
gtgattcgaaagccctggaacatgtggtgcttggttcttgcagcattcttgcatcacagactgttttgagacacttgacaactgattctgcttccctctcttcattaatcatgggaattttgggaagctctcatcatgaatcgataaagtgtcagaaagctattactgagctctttgtgaaatacaacatacgtttctctggaatatcaaggtcttttttcaagaattctcaaagtctggctgacaggc

SEQ ID NO: 8114 - DNA, 209 bp, Triticum aestivum
  Clone ID: uC-tsrow189030d01b1
ttttaaagttccaaaccaaaccaacgaatccttccttctgctacctgcctacgtgatcagcagtcaacaatcgacccagcttccagcgctcgatcgatcagcagccatggttgccaccgccatgcaggccctcttcgaccagcccgagctctccctctccctctccctggtccccgccgtcgcgccggcgctcaacaaggacgactacc

SEQ ID NO: 8115 - DNA, 324 bp, Triticum aestivum
  Clone ID: uC-tsrow189030d02b1
ccctcgcgtccgcggacgcgtgggcgagaaggtgcaggaccttctcctccttgatgtcaccccactgtctcttggtcttgagactgctggaggagtcatgactgtgctcatcacccggaacaccaccatccccaccaagaaggagcaggtcttctccacctactccgacaaccagcctggtgtgctcatccaggtttttgagggtgagaggacaaggaccagggacaacaacctgcttggcaagtttgagctctccggcatcccgcctgcacccaggggtgttccccagatcactgtctgcttcgacattgatgccaacggtat

SEQ ID NO: 8116 - DNA, 295 bp, Triticum aestivum
  Clone ID: uC-tsrow189030d04b1
cccaacccaaaccctaaccctggaattttagcaaccagccggcggtttttggggcagggttctccaggcggcatgggcaagcagggcggtctccccggtgaccgcaagccgggcgacggtgccgccggcgacaagaaggacaagaagttcgagccccccgccgcaccgtcgcgcgtggggcgcaagcagcggaaacagaggggccccgaggcggcggcgcggctgccccccgtggcgccgctctccaagtgccgtctccgtcttctcaagctggaccgcgtcaaggactaccttc

SEQ ID NO: 8117 - DNA, 280 bp, Triticum aestivum
  Clone ID: uC-tsrow189030d05b1
tcagcagcgagtgggtgaggtcccgcattgtcgagggcacgcaggcttctttggtggtcgactgctcgtggtttctggtcccgccctcgtcgcctcaccgccccgtcctcgctggagcggcgtactttgatgtggacgaggtggcggaccggtcggaggacaagagcccctcgccccacatgctgccctcgcccgaccagtttgccgcctggatggaccgccacaacatcacccctgatgaccacgtgcttctctacgatcactccaacggcctcctcac

SEQ ID NO: 8118 - DNA, 273 bp, Triticum aestivum
  Clone ID: uC-tsrow189030d06b1
gggcacgcaggcttttaaggcggtcgactgctcgtggtttctggtcccgccctcgtcgcctcaccgccccgtcctcgctggagcggcgtactttgatgtggacgaggtggcggaccggtcggaggacaagagcccctcgccccacatgctgccctcgcccgaccagttcgccgcctggatggaccgccacaacatcacccctgatgaccacgtgctcctctacgatcactccaacggcctcctcactgcgtctgctcgcgtctggcggacctt

SEQ ID NO: 8119 - DNA, 236 bp, Triticum aestivum
  Clone ID: uC-tsrow189030d07b1
ttctgccactctcttctactttgccgtgttcttttctcacggatcggatcggatcagatcagatcagatcaccatgagctccaacgttcaaggtgagggtgaagtccccgtctacgaatcgggtgcagatgccctgcagaagctgcaagagaaatggaagtccacggcggcgccgtacccggccatgtactcgagcttcttgggcgggatcatcctggacccggccatgatggccc

SEQ ID NO: 8120 - DNA, 358 bp, Triticum aestivum
  Clone ID: uC-tsrow189030d08b1
gcacgcacccatctacatcttgtcctccgttcagcaaccaagccaagctcgagcggcggcaatggagggcaaggaggaggacgtgcgcctgggcgcgaaccgctactcggagcgccagcccatcggcacggcggcgcagggcggcggcgcggacgagaaggactacaaggagccgcccccggcgcccctcttcgaggcggaggagctcacctcctggtccttctaccgggccggcatcgccgagttcctggccaccttcctcttcctctacatctcggtgctcaccgtgatgggcgtggtgggcaacccgtcggggtccaagtgcggcacggtgggcatccagggcatcgcctggagc

SEQ ID NO: 8121 - DNA, 185 bp, Triticum aestivum
  Clone ID: uC-tsrow189030d10b1
ggttcgagaaggaagccgctgacatgaacaagaggtccttcaagtatgcctgggtgcttgacaagctcaaggctgagcgtgagaggggtatcaccatagatattgctctgtggaagttcgagaccaccaagtactcgtgcactgtcattgatgctcctggtcaccgtgatttcatcaagaacatg

SEQ ID NO: 8122 - DNA, 293 bp, Triticum aestivum
  Clone ID: uC-tsrow189030d12b1
gccagagctccgcggacaagagagtgaccactcccgcgcgaacacgtaggctgagcgggacaagatgccaatggagaggtcggtgtcgctggctgagaggagaaccgccgccgtcgcgccggccaacgacctccggtgccacagcgcctcctacgccgtctcctacgcgcccaccaaggtgcagcgcgacaggagcaccacctccctgtcccgccccgtggcggcgaccgccgtgcagcggagcggcagcacgaggaccgtctccggcgccggcgccggccccaccccggggc

SEQ ID NO: 8123 - DNA, 251 bp, Triticum aestivum
  Clone ID: uC-tsrow189030e01b1
gtccgattgaccacccagagtcggcaaccttcagcggatgtggcatttagtgtcctcattaaacttgttattgacatgtatatgatggactctgaggctgctgctcctctgacactttatatgcttgagggcatgttaagctctcagaaatcacctgccagaacaaaggctttcgatctgattctgaaccttgggattcatgcacacctgctggagcctatgatagttgaagatgcaccacttattgaaaa

SEQ ID NO: 8124 - DNA, 240 bp, Triticum aestivum
  Clone ID: uC-tsrow189030e02b1
ccaagaaaccggcgttcagatcgatcgatcggcccttgcctgagccggcagcagtagacatgaacaacctcttctccagctcgtggaagcgcgcgggcgcggggggcgacggcggggacctggagtcgggcggcgtggagatgacggcgccgccgggcgccgcggcgggggcgagcctggaccgcttcttcgaggacgtggagtccatcaaggacgacctgcgggagctggagcggatcc

SEQ ID NO: 8125 - DNA, 204 bp, Triticum aestivum
  Clone ID: uC-tsrow189030e04b1
gggcaagggcaagccgcgggaccgcctggacgccggcaggccctgcccgctcgaccacacctggaagtcctacgacctctacatcgccggggacgggggcagcgccgcctcgccggcctccgggccggcattttccgcctggtagagggagcgcccgcagctgcactgactagacacagtgattccctcgccggctgggcggcc

SEQ ID NO: 8126 - DNA, 269 bp, Triticum aestivum
  Clone ID: uC-tsrow189030e05b1
cctacatatctactatatacacagagaactgggtaaattcacctggacacgaggaagataactcgcggcaggctttcgtgagcgtgcctcatggcagctggcgaatcctgaagatccctctcgatagctacttacctacatggaaaggaaacgtgatcgaagcgaacatggaaatgaatccttctcgcgtcgtgggaatgtctctctcgctaaatgcagaaggcggcgttcctggcgctaagactgggccaggcgattctagattagac

SEQ ID NO: 8127 - DNA, 288 bp, Triticum aestivum
  Clone ID: uC-tsrow189030e07b1
gtccgtgtgcttcttcttccttgtgtctcctactgtcttcttgattgcgcaacaacaatattcacggaggaatcggagtggccgcccttggcctacccaatacaagtcttctcttcaaggacatggagatgggaggagaggtcgctggcccggagaggagaggctgcagggaccatcgctgacatggatccatatagggattatgaacaccgttatgccgtctactggaaaggagcgatctatgtgcattgtcaaaatgactccattttacgcataaccttaacggat

SEQ ID NO: 8128 - DNA, 248 bp, Triticum aestivum
  Clone ID: uC-tsrow189030e08b1
tcctcctcctttccccaacccagaccaggagcgccctctctcccccgccccctccctccaggaaaccagccatgatgggggccaaatccaagggcgccgccaaggccgacgccaagttggcggtgaagagcaagggggcggagaagccggccgccaaggggaagaagggcaaggccggcaaggaccccaacaagcccaagagggcgccatccgccttcttcgtcttcatgggcgagttccgcgaggag

SEQ ID NO: 8129 - DNA, 255 bp, Triticum aestivum
  Clone ID: uC-tsrow189030f01b1
gtccgtccatcttctgatcgtctacccgctcgctttctctttccctgcgagcagcccaggccggaggcatgtcggccaagaagatcgtggtgaagctggagctccatgacaacaaggacaagcagaaggccatgaaagccgtctccgttctcgtcggcatcgatgccatatccatggacctggcgtcgcgcaagatgacggtgatcggcacggtggacccggtgcacgtggtgagcaagctgcgcaagggctggg

SEQ ID NO: 8130 - DNA, 328 bp, Triticum aestivum
  Clone ID: uC-tsrow189030f04b1
ttctttctctctcccaacccaaaccctaaccctggaatcgaagcaaccagccggcggcgatggggcagggttctccaggcggcatgggcaagcagggcggtctccccggtgaccgcaagccgggcgacggtgccgccggcgacaagaaggacaagaagttcgagccccccgccgcaccgtcgcgcgtggggcgcaagcagcggaaacagaggggccccgaggcggcggcgcggctgccccccgtggcgccgctctccaagtgccgcctccgccttctcaagctggaccgcgtcaaggactaccttctcatggaggaggagttcgtcgc

SEQ ID NO: 8131 - DNA, 292 bp, Triticum aestivum
  Clone ID: uC-tsrow189030f07b1
aaagcctcctagatataagcagccggagtacctaataagcagactctatcaggcttctgtgctgaatggtgatactgctcaagcaaatgggcagatctgctttactagaaatacttcatcacttgtaaagcctcctaaatataagcagtctgaggatttaaaaagcagacacagtctaacaccgcagctgccaatcaattgccctgcggcttcgaagcctcttgtgcatcctataaccaatgagaacactctcaacactttggtctcttcattacctgttctagagcatgct

SEQ ID NO: 8132 - DNA, 287 bp, Triticum aestivum
  Clone ID: uC-tsrow189030f08b1
ttgacgcgtgggcgacccacgcgtccgccacgcgtccggattcattcaaggcactcagcgacgaggggatgccgatgtaccagaggcctttcatgaagggcaagctctacattcatttcacggtggagtttcccgactcgctggcaccggatcagtgcaaggctctcgaggctgtgcttccaccaaagcctgcatccaagctgaccgacatggagctcgatgaatgcgaggagacgacaatgcatgacgtcaacatggaggaggagatgcgtcggaaagcccatgct

SEQ ID NO: 8133 - DNA, 200 bp, Triticum aestivum
  Clone ID: uC-tsrow189030f09b1
ggaagagccctttggttaatgcatggattttattaagccaatggtggctgtggctacgcgaagaaaccggatttcttgatgcagtctgagccggaagtttttgatccaaaaaagcctcaacctgttaagaagaccttgaaggtaaaagtgcacatgggtgatggctggcggatggacttcaagcagacacactttgacca

SEQ ID NO: 8134 - DNA, 333 bp, Triticum aestivum
  Clone ID: uC-tsrow189030f10b1
ttgtcatgcgtccgggggcatttgagaaagagggtgagatgaacgtatttgttcgagtaagcaaatctattgtaaacacattatctaagcactggacaacaactagagaagctgaatttcttgcttcaacaattgtttcatcccttgctgagaaacgtcaaaaacatgagaaattccttcaatttcttgtcttgtccaagtgccatgaagaactatcttcaaaacaaagagctgcaatgctaagtgtcatggaacatggagaaaagctctctggaatgatccatcttagagaattacaaaatgcccttagccagcagagttcaagcacacgtt

SEQ ID NO: 8135 - DNA, 201 bp, Triticum aestivum
  Clone ID: uC-tsrow189030g01b1
cacgcgtccgcccacgcgtccgtagactgtgtgcacatatccaaacagcctgcattcgatcatcctctcctcaagaaccatactattcagatgcggccttcttacaacccaagaggcatgcatcatgactccaacatcacagcccatgcaatcactcaaatatggcatcaaaatggcacgtgccctaagaacaccatacca

SEQ ID NO: 8136 - DNA, 327 bp, Triticum aestivum
  Clone ID: uC-tsrow189030g02b1
cgcgcccgcaccccaggaaggtaagctcaagaggctgtcctgagaagctcaaatggctcccaaagttgctgttgccaagaagggcgatgccaaggcccaggctgccaaggttgccaaggctgtgaagtccgggtcaatcaagaagaccgcaaagaagatccgcacgtctgtgacatttcaccgtcccaagaccctgtccaaggccagggaccccaagtaccccaggatcagcacccctggcaggaacaagttagaccagtaccagatactcaagtacccgcttaccactgagtctgcgatgaagaagattgaagacaacaacaccct

SEQ ID NO: 8137 - DNA, 332 bp, Triticum aestivum
  Clone ID: uC-tsrow189030g04b1
ttttcgcgtccgcacaagcacactgcaccatggcgctcaccgtcaagagcaccgacgaccaggccgtgctggacgccgagcacgagctctgggcgaccacattctcctacatcaagtccatggcgctcaagtcggcccttgacctccgcctcgccgacgccatccaccaccacggcggcgccgccaccctccctcagatagccgccagggtcgcggtgcacccgtccaagatcccctgcctgcgccgtctcatgcgcacgctcaccgtctcgggcgtcttcagcgtcgtccagcagcaggacgtcgtcgttcctgctgcccccgtgagcaac

SEQ ID NO: 8138 - DNA, 187 bp, Triticum aestivum
  Clone ID: uC-tsrow189030g05b1
gcgcaccgtccacgtccatggcgtgcacgccctctttcgccgtccaccgcgccgtgtggaccttgtccccctccgcgccgcgccgagggccggcgaaatctgccgcctttgtcagcgttccggggggacggccccgggggcggcggccggtgctggcggcggcgctgggcgacatggacatgcgccc

SEQ ID NO: 8139 - DNA, 198 bp, Triticum aestivum
  Clone ID: uC-tsrow189030g06b1
gtccaccgcgcctcgaggaccttgtccccctccgcgccgtgccgcgggccggcgaaatctgccgcctttgtcagcgttccggggggacggccccgggggcggcggccggtgctggcggcggcgctgggcgacatggacatgcgccccgccattgacgagaaccccgagggcgtgctctccggcgagtggcccggcaac

SEQ ID NO: 8140 - DNA, 109 bp, Triticum aestivum
  Clone ID: uC-tsrow189030g07b1
tgaaaggccataagcctagctctcaccggagtaacatattgaagatccaccaccaccaccacgatgacgacgatgatgacgatgatgatgatggtggtggtggtggtgg

SEQ ID NO: 8141 - DNA, 313 bp, Triticum aestivum
  Clone ID: uC-tsrow189030g08b1
ataaaaccagaatatcagaatgaaacatcatggctgcttgcgcaaaaggagctacagaagataaacatgtataaggctccaagggataagcttgcttgcatcctgaactgttgtaaagtcatcaataacttacttatgaatgcttctcatatgtcacatgataacccccctggagctgacgaatttcttccagtcctcatctatgtcaccataaaggctaatcctccgcagttacactcaaatcttttatacatacaaagatacaggtgccaatcacgactggtgtcagaggctcaatatttttttacaaacc

SEQ ID NO: 8142 - DNA, 204 bp, Triticum aestivum
  Clone ID: uC-tsrow189030g09b1
tggctagacaacacgaagagatgcatccagttaaggtgaaggtgaaggacggctcgagcgcgctgagggccaagctggcggagaaggtggaggcggcgacgtcgaggtcgcacgacgagcggaagctggcgcacgagcgcggcagggccaaggtcgccgcggccgaggcgcagctgcacagggagaaggtcgcgcaccgggagg

SEQ ID NO: 8143 - DNA, 165 bp, Triticum aestivum
  Clone ID: uC-tsrow189030g10b1
gactgaaaggtggattggtcatatcattcatgaacatggcatcactggtaaacttggatttatcacacaacaatttgacaggagctattccagactaccaaataaagtcactcaaagttctcgatttgtcatataaccagcttgatgggccaatcccggattcta

SEQ ID NO: 8144 - DNA, 180 bp, Triticum aestivum
  Clone ID: uC-tsrow189030g12b1
aggacaacaatgtgcactgcctcgtcttctgcttcgtcaactggtctttcgtgtgatcatccatcacccttgcctgtcccatgcagctccatttttgctctctctgtaggggagaaccgccgccactggaaagtagttttacgttatctttaactagtttgtttctagatttgaagagcc

SEQ ID NO: 8145 - DNA, 268 bp, Triticum aestivum
  Clone ID: uC-tsrow189030h01b1
ttttctcgtccgcccacgcgtccgttctccacctactcggacaaccagcctggtgtgctcatccaggtgtacgagggtgagaggaccaggacccgtgacaacaacctccttggcaagttcgagctgtccggcatccctcctgcacccaggggagttccccagatcactgtctgctttgacattgatgccaatggtatcctgaacgtgtctgccgaggacaagacgactgggcagaagaacaagatcaccatcaccaacgacaagggca

SEQ ID NO: 8146 - DNA, 294 bp, Triticum aestivum
  Clone ID: uC-tsrow189030h02b1
gaatactttgataatactctgttggagtacctagtcagtgaatacaaaagatctgataatattgatctgtcaaaagacagactagctctgcaaaggttgcgtgaagcagctgagaaggcaaaaattgaactctcatcaactgcacagactgagatcaaccttccttttatcacggctgatgctgctggagcaaaacatttgaatataacattgacaagatcaaagtttgaaagtttggtgaatggtctcattgcaaggactagagacccatgcaagaattgtttgaaggatgct

SEQ ID NO: 8147 - DNA, 192 bp, Triticum aestivum
  Clone ID: uC-tsrow189030h03b1
ctatatatcaaacacccagataaagagtgtcaccagatcaaatgcaaagtaaagagtgacaaatagtcaatgtaccaagtaaggggtggcaaataatcaaattcccctcaataaacctacatctatggccaccttcacccgatcaccgctcccgccggccgaccccgagaaggagaagccgctcgcccgctc

SEQ ID NO: 8148 - DNA, 300 bp, Triticum aestivum
  unsure (1)..(300): unsure at all n locations
  Clone ID: uC-tsrow189030h05b1
tgtttccacgcgtccgcctanctgtccgcacaagctagccacagctcgaccggcacgtttcagctagctaggccaggacaatcaacagcgaagatggcctccctcaccgtctcgcagacgacaccggcggccggcaacgccaacaagcagcgcgagggcgcggagatcatcaccggcgctgaggcgtgctacgagcactccaaggagctcctcaaggggctggggttcccgggcggggtgatgccgctgcgcgggctggaagagtgcgggctggtgcgggagaccgggtacgtgtggatg

SEQ ID NO: 8149 - DNA, 326 bp, Triticum aestivum
  Clone ID: uC-tsrow189030h06b1
cacaagctagccacagctcgaccagcacgtttcagctagctaggccaggacaatcaacagcgaagatggcctccctcaccgtctcgcagacgacaccggcggccggcaacgccaacaagcagcgcgagggcgcggagatcatcaccggcgctgaggcgtgctacgagcactccaaggagctcctcaaggggctggggttcccgggcggagtgatgccgctgcgcgggctggaagagtgcgggctggtgcgggagaccgggtacgtgtggatgcggcagggaaagccctacgagcaccactttcgcgccacgggcacccgggtgcgc

SEQ ID NO: 8150 - DNA, 211 bp, Triticum aestivum
  Clone ID: uC-tsrow189030h08b1
tgctcccgcgaggcgaccggggggcaaccctaaatcccgccggtctccgccccctgtcccctccccctccctcgccgccgcccgtgggcgcggctgggcaaagcccagccgtcgccggcggcggcggggcctcatcgtcctcctgctcgggcggtgctggcgcgggccggcgcctcgggtcggagcgtggagctgtgccgggcgacacggc

SEQ ID NO: 8151 - DNA, 228 bp, Triticum aestivum
  Clone ID: uC-tsrow189030h09b1
cgtcgcctctccctctcccacacgaaaccagctatcccccgaatccgtgagatccgaggagggtcgcctcgcctcggcactagcatccgcggcgtcgaagatgggatcggaggcggacatgaccgggcccctcctcgccggcggcagcggcgtcgcgccggcggcggaagcggaggtggtgccgccgtggcgggagcagctcacggtgcggggcatagtggtcagcgc

SEQ ID NO: 8152 - DNA, 181 bp, Triticum aestivum
  Clone ID: uC-tsrow189030h10b1
tctctcatcaccagcttcacaccgtgcctcagctggctcaccaacagcaccaacggcggggggtcgtcgccgacggcggactgctgccggtccctgtcggcggtggtgaccacgagcaccagctgcgcctgcctcatcctgaccggcaacgtgccgctcggcctgcccatcaaccggaccc

SEQ ID NO: 8153 - DNA, 296 bp, Triticum aestivum
  Clone ID: uC-tsrow189030h11b1
tcttctcttcacaacaagaagcggacgctagctagagcctatgagcagaggaggcggaggacgaggaagaagaagcttcacacacagcgcgggcgccatgagggggaggaggagggggagcagcggcacggccaccgacttcctcgtctgcttcccgccgcgggcgcacctggcgctgatgccgcccaagacggtctgcagcccgtcgaggccgtccgcgagctccgagcgccggcacagcaccagcggcgcccggccgtcgtcgtcgtcgtccagggcggccaccaacaggaacc

SEQ ID NO: 8154 - DNA, 285 bp, Triticum aestivum
  Clone ID: uC-tsrow189030h12b1
ttcttgtgttgcggtgatcagctggttggctctgccagctatgttcaccatcttcaacttctgtgctcagaaggacgtgtccaactggggcctgttcttctgtgtggcagttggtctgtgggctggtctgattattgggtttgtgaccgaatactacactagcaatgcctacagccctgtgcaagatgttgccgattcctgcagaactggtgctgccaccaacgtcatcttcggtcttgcccttggttacaagtcagtcatcatcccaattttcggtattgctgt

SEQ ID NO: 8155 - DNA, 362 bp, Triticum aestivum
  Clone ID: uC-tsrow189033a11b1
ttggaactggctctggccttggctcgcttctcctggagcgcctctctgttgactatggaaagaagtccaagcttgggttcacggtgtacccatctccccaggtctccacctctgttgttgagccatacaacagtgtcctgtccacccactcactccttgagcacactgatgtctctatccttcttgacaatgaggccatctatgacatctgccgccgctcccttgacattgagcgcccaacatacaccaacctcaacaggcttgtttctcaggtcatttcatcactgacagcttccctgaggtttgatggcgctctgaatgttgatgtcaatgaattccagaccaacttggtgccctacccg

SEQ ID NO: 8156 - DNA, 326 bp, Triticum aestivum
  Clone ID: uC-tsrow189033b01b1
cttttccgtcttcccggtgttccgctcccgcagcagcaccaacaccaacacggttgcttctaccccagcggcggaaggaatctagagccccctcctgccccggcgccgggcggggcctcgacgggtaaatcgcgacggcaccctagaacccccgagcagccagacgatggaggaccgcggcaggcagctgcggaggcggctgcgcgcggcgaatgggggactacgtgctgctgcgcccgatcgggtcgggggcctactcgcaggtctggatggggaagcacgtcgcgcggtgcaccgaggtggccgacaaggagatcgccatggac

SEQ ID NO: 8157 - DNA, 307 bp, Triticum aestivum
  Clone ID: uC-tsrow189033b05b1
cttagactgaactggacggggtctgcttgatattgctcccctgtccccactccctgcctgcaaactagccgacgatggaacttcacatgaagcttctgctggcctccctcagctgtgtacttctaatacaaggagcattctgtgataacactgcaggggggactggagccacaagccggacatgtgtgtgcgctgatcatccgcttggtgaatctaactccaatagcaatctgccatgcacctgcaactgctcgtgccattggctaccagatgaaaacggcggcacacggtcatggaactgctcgtg

SEQ ID NO: 8158 - DNA, 375 bp, Triticum aestivum
  Clone ID: uC-tsrow189033b07b1
cttttccgtcttcccgttgttccgctcccgcagcaacaccaacaccaacacggttgcttctcccccagcggcggaaggaatctcgagccccctcctcccccggcgccgggcggggcctcgacgggtaaatcgcgacggcgccctagaacccccgagcagccggacgatggaggaccgaggcggcagctgcagaggcgggggcgcgcggagggtgggggactacgtgctgctgcgcccgatcgggtcgggggcctactcgcaggtctggctggggaagcacgcctcgcggtgcaccaaggtggccgtcaaggagatcgccatggaccgcctcagcgcgaagctccgagacagcctcctttccgaggtcgacatcct

SEQ ID NO: 8159 - DNA, 440 bp, Triticum aestivum
  Clone ID: uC-tsrow189033c06b1
cttcgcgtccgcccccctcgtctcccctcctcactcctctagccgccgccgccgccgtcgcccgcgaagaagcccctgccaccggagatctcccgacctctcccctcgccgcccgcccggagatctcccggactgtccctccgccatcatgggtaagacacgtggtatgggagccgggcgcaagctcaagacccaccgcaggaaccagaggtgggctgacaaggcatacaagaagagccacttgggcaatgagtggaagaaacccttcgctggatcgtctcacgccaagggcattgttttggagaagatcggtattgaggccaagcagcctaactctgccatccgtaagtgtgctcgtgtccagctggtgaagaacgggaagaagatcgctgcctttgtgcccaatgatggttgcctgaacttcatcgaggaaaacgacg

SEQ ID NO: 8160 - DNA, 65 bp, Triticum aestivum
  Clone ID: uC-tsrow189033c07b1
gtctcgcaccaggctctgcaaggacgagggcggatgcccgcgccgcatctgcttcttcgcgcacg

SEQ ID NO: 8161 - DNA, 221 bp, Triticum aestivum
  Clone ID: uC-tsrow189033c08b1
gtgggcgtgcgccacgcccccttggcgatagacctttcgaaaaccgacgcgccaaccgccacccagggccgttcaagaaaccggacgccaccggggtcgctacccctggccgtcgccaagatggtgcggattagcaacacggtgatcgggatcctgaacgcggcgaccttgctgctctcggtgcccattctggcgggcggcatctggctgggggcgcgcgc

SEQ ID NO: 8162 - DNA, 362 bp, Triticum aestivum
  Clone ID: uC-tsrow189033c11b1
ttttcggatggggctacgactcgctcaagaacttccgcgagatctcccccgccgtgcagtcccacctcaagctcgtttacctgaccctatgctttgccctggcctcatctgccgtgggtgcttacctgcacattgccctgaacatcggtgggatgctgacaatgcttgcgtgtatcggaaccattgcctggatgttctctgtgccagtctatgaggagaggaagaggtttgggctgctgatgggtgcagccctcctggaaggggcttcggttggacctctgattgagcttgccatagactttgacccaagcatcctcgtgacagggtttgttggaaccgccatcgcctttgggtgcttctct

SEQ ID NO: 8163 - DNA, 96 bp, Triticum aestivum
  Clone ID: uC-tsrow189033c12b1
cttacgcgtcggcgagcttcgttcccttcccattaagcctgcccgttacctccgccccaatctgagatggaccgcctgtcactggcaatctaccaa

SEQ ID NO: 8164 - DNA, 496 bp, Triticum aestivum
  Clone ID: uC-tsrow189033d01b1
tttctcgtccgctttcagcgaaatctgttgttctgaacttcatttgtcagctgattatatttctgtacctgcttgacaatgatacatcatggatgattcttgctagctctggagttggtgtgtgcattgaattctggaagataggaaaagcgatgcatgttgagattgacagaagtggaaagattcccatgttgagattccgggatcgtgagtcatatgcacagaataagaccaaggagtatgatgcgcttgcgatgaagtatcttacatatgtccttctagtccttatggctggttttgctatctattcactcaagtatgataaacacaagagctggtactcgtggatactctcttccctcacaagttgtgtttacatgtttggtttcattatgatgtgcccacaattatttatcaactacaagctgaagtccgttgctcacatgccatggagacaaatgacctacaagttcctcaacactataattgatgatct

SEQ ID NO: 8165 - DNA, 432 bp, Triticum aestivum
  Clone ID: uC-tsrow189033d03b1
ctttcgcgtccgcccacgcgtccgcccgcgcccttaccgacacaaacctgcggcgaggtccctgctcgcgcttcctcttacacggggggcccctacacttctccggccacgccaccggagatggcgtccgagctcacgtaccgcggcggggccgcgtccccgtccgcgggcgccgccggcgccgccggcgagtactcctccccgaagcccgccagctccaagccgctcgcgtggctgccccgcgccgcccgctacgccgcggccgagcaccgcccgctcttcgccctcgtcggcatgctcgtcgccgccgccatcttctgcctcgccgccccctccggctccggctccggcaccgccgccccctactcctcctccggacgcgtctccggcgcgctcacccgcttctccgtcgaccccgccgcgcacaaccct

SEQ ID NO: 8166 - DNA, 430 bp, Triticum aestivum
  Clone ID: uC-tsrow189033d04b1
cttacgcgtccgcacgggcccacgatacacgtgcggctcaggttctgcgacgtcgccgccaatccccgcgagtggggcgcgggcctcggcggcgcgcggcaccccggcgtgccgtacaccttcttctcccagcggcccgggtgcagggtcaccctgtaccaggacgcgcacaccccggacgcgttcgcgcccaggatcccgctctccggcggtcggacctaccagcagggccggtgctgggaggacgtgttcgacgccatcagtgacgcgcgccacctgatatacgtcaccggctggtcggtgtacaccgagatcacgctgatacgggacggctcccggccgcgccccggcggcgacgccaccctcggcgagctcctcaagcgcaaggccagcgagggcgtgcgcgtgctcatgctggtctgggatgacc

SEQ ID NO: 8167 - DNA, 307 bp, Triticum aestivum
  Clone ID: uC-tsrow189033d05b1
ttttgcgtccgcatggtctcactatgctcctgctgggaacctataccctgctcctcaaccctcttcgcggggcggggcggcgcggcacagcacagcggagccggcggagatgtcgggagtgacggtggacgaggacaagaagcccgcggacgacggtggaggcgcccacattaacctaaaggtcaaggggcaggatggcaatgaggttttcttgcgcatcaagagatccacacagctgaagaagctgatgaacgcttactgcgaccgccagtctgtggatctcaactccattgctttcctttttgat

SEQ ID NO: 8168 - DNA, 472 bp, Triticum aestivum
  Clone ID: uC-tsrow189033d06b1
ctttcgcgtccgcatcttcttcctctgctcctgctgggatcctataccctgctcctcaacccccttcgcggcgcggcgcggcgcggcacagcacagaggagtcggcggagatgtcgggagtgacggcggacgaggacaagaagcccgcgggcgacggtggaggcgcccacatcaacctcaaggtcaaggggcaggatggcaatgaggttttcttccgcatcaagagatccacacagctgaagaagctgatgaacgcttactgcgaccgtcagtctgtggatctcaactccattgctttcctttttgatggtcgtaggctccgtggtgagcagacccctgatgagcttgagatggaggaaggcgacgagatcgacgccatgcttcaccagaccggagggtgctttcctggcccttagaaggagcttgctgcagcctggctgttctatgtcgtatgctacctttagaactagag

SEQ ID NO: 8169 - DNA, 462 bp, Triticum aestivum
  Clone ID: uC-tsrow189033d07b1
atgtactacctcctctttcctactgggtaggtggaggaaatcgcctactcgcaaatctgggcggcttcagatgccttcactcgcgtcggaggtgctgacaaaaattgcccggagctggcgcgcgtgtgcacgtgggtggtggggctgtgctgggcccagccatggactacatggccatggacagaagctgaactgatgatgaccttcgaccaccatatgctaataatgcgcataataggagtataacaggcagcggacgtgccagtggtaatggcagagctattgctcctgtcagtggtaatggaaggggcattgctcctgccagctcgtaccctagagcccagaccgatatggaaacacaaattcaacagcttgagcaagaagcgtattgtgcagttctgcgtgcttttaaagctgagtctgatgccctcacatgggagaaggagggtctgattactgaac

SEQ ID NO: 8170 - DNA, 429 bp, Triticum aestivum
  Clone ID: uC-tsrow189033d09b1
tgtcagatataaatgtgcccgcggcgcatgtggcacttcaccagtggcaaccaaatactccagatggtcaagggacacctttcctttttcatcatggtagaaatgctgcaagttcaacaagtggtgcattcatgcgtatgttcaaaggatccactagttctggagaagattatgagttcccaagagctatagcgtttgctgcttcggcaatccgtagttcagctattgttgctgtcacttgtgacaaagacatcatcactggtgggcatgcggactgttcggtgaagttgatctccccagacggagcaaggacaattgaaagtgcttctgggcatcttgctccagtaacctgccttgcactttcccctgatagcaactaccttgtgacaggctctcgagatactacagttatactctggaggattcatc

SEQ ID NO: 8171 - DNA, 283 bp, Triticum aestivum
  Clone ID: uC-tsrow189033d10b1
tttacgcgtccgcacgggcccacgatgcacgtgcgggtcaggtactgcgacgtcgccgacaatccccgcgagtggggcgcgggcctcggaggcacgcggcaccccggcgtgccgtacaccttattgtcccagcggaccggatgcagggtcaccctgtaccaggacgcgcacaccccggacgcgttcgcgcccaggatcccgctctggggcggtcggacctaccaagatggacagagctgggaggacttgttagacgccactagtgacgcgcgccacctgatat

SEQ ID NO: 8172 - DNA, 389 bp, Triticum aestivum
  Clone ID: uC-tsrow189033d11b1
cttacgcgtccgcatcttcttcctctgctcctgctcggatcccataccctgctcctcaacccccttcgcggcgcggcgcggcgcggcacagcacagaggagtcggcggagatgtcgggagtgacggcggacgaggacaagaagcccgcgggcgacggtggaggcgcccacatcaacctcaaggtcaaggggcaggatggcaatgaggttttcttccgcatcaagagatccacacagctgaagaagctgatgaacgcttactgcgaccgtcagtctgtggatctcaactccattgctttcctttttgatggtcgtaggctccgtggtgagcagacccctgatgagcttgagatggaggaaggcgacgagatcgacgccatgcttcaccag

SEQ ID NO: 8173 - DNA, 415 bp, Triticum aestivum
  Clone ID: uC-tsrow189033e01b1
cttacgcgtccgccctatcatcgcgcccaagatctccgtcgccgcctacttcaaccgtcggcacacggagcgcaatcagaagacatcctactccatcacgctccagggggtggtcggccctgaccgcgccttcaccgacgtctgcatcggctggccgggctccatgccggacgatcaggtgctcgagaaatccatgctgcaccagcgcgccgcggcgggtatgatgcacgacgcttgcctcgtcggcggcgcaagctacccgctcatggactgggtgctcgtgccgtacacgcaccagaacctgacatggacgcagcacgccttcaacgagaaggtcggcgacatccgcaacgtggccgtggaggcgttcgcgcggctcaagacgcggtgggcgtgcctccagaagcgcacggag

SEQ ID NO: 8174 - DNA, 456 bp, Triticum aestivum
  Clone ID: uC-tsrow189033e02b1
ctttaccggaggaggaggagagcggcggccaagatggtgtcgctgaagctgcagaagcgcctggcctcgagcgtcctcaagtgcggcaagggcaaggtctggctcgaccccaatgaggtcaacgagatctccatggccaactcccggcagaacatccggaagctggtgaaggatggtttcatcatcaggaagcctcagaagatccactccaggtctcgtgcaaggagggcacatgaggccaagcagaagggccgtcactctggatatggtaagcgtaggggtaccagggaggctaggctccccaccaagatcctgtggatgcggaggatgcgtgtcctgaggcgccttctgcgcaagtaccgtgaggccaagaagatcgacaagcacatgtaccatgacatgtacctgaaggtcaagggtaacatgttcaagaacaagagggtcctcatggagagt

SEQ ID NO: 8175 - DNA, 487 bp, Triticum aestivum
  Clone ID: uC-tsrow189033e03b1
atttcgtgaaagttctgattctgactctgaggaggaggataccactgctaaaccagttcaatcttccaaggctggtaagaagggcaaagaatctagtgatagctcagattctgactcagattcagattctgaagaagataccaccgctaaaacagtctctgtaaagaaagaagaatctagcggcagctcagatagcgactcggattcagattctgatgaaccagcaaaatctactattcctgcgaagaggcctctgacaacagagaaaaagagtgaacattccaaggatgattctgatgatagttctgatgagagtgatgaggaagagcctccacaaaagaagcctaaggattcatcttctggtgctgccaagccagtctctaaggctgccaagaaagaaagcagtgatgatgatgacagttctgaagagagctctgacagtgatgaggaaaagagtaaatcggtgtcagtggcaaaacccaagcag

SEQ ID NO: 8176 - DNA, 498 bp, Triticum aestivum
  Clone ID: uC-tsrow189033e04b1
ctgccccctttcgctgatcgctggggcctcacaatcaatcggctactcccctctcctctcgcgcgtggcgaattcccctctccctctctcacgctgcagcgaccccggaggcgacgtcggcggccacagcttgccgaaatggcatcatcttcggacccatggatgaaagagtacactgaagcatctaagcttgttgatgatataagctccatgattgccgatagaagttctcttccacaatcaggccccgaaattatgcgccacacatcagccatccggagaaaaataaccattcttgggactagactggatagctcggtgacattgttgtccaggattcctccaaagtcactcactgacaaggagatgcataagcgccaagatgcactttccaatttgaaatctaaagcaaaacagatggggacaagtttcaacgtgtcaaactttgccaacagggaggatttgcttggtcagagtaagacagcagctgatgatatg

SEQ ID NO: 8177 - DNA, 461 bp, Triticum aestivum
  Clone ID: uC-tsrow189033e05b1
ctttccccctcgcttgccagaagaagcccgagagacccccgaagagagccctccagatgcagccggccgccgccgagatgcagccgcccgtcggctcccccaccgccgctccccaatccgaggtccagcacccgctgtctacccctgatccttcctctccccccgctcccgcaccggcgccggacccggccgatccgccctcgtccgcgcccgccctggcgccggtgcagctgcagccgcagcagcatcccaagaccgtcacgtggagcgagaagctcacgtccgagtcgcccacctacgtgccggccgccgccgccgcggagtccagccagtacgtctcccgcgggcccgccgtctcctcctacaagggcgcggtggaggcgatgaaggacacgctgtcgaggtgggggaagtccatggcggagaccaccagcatggtcgagagcctcagccgcgacacg

SEQ ID NO: 8178 - DNA, 403 bp, Triticum aestivum
  Clone ID: uC-tsrow189033e06b1
ctttgcgtccgggcagtcttggcaaagtatatacgccaacccgctcgatccctgcactccgtatgctacctgtgggccattcacggtctgtactggtaattcacatccttactgtgactgtatggagggattctctcagaagtcaccacagggttgggaccttgatgatcgaacaggagggtgcatcagaaatactccattgcagtgcactagcaagaagaacacgataaattcaacggacaagttccaccccattgctcgtgttacattgacctatgaaccccgaagcatgggcaatgctaccactcagagcgaatgcgcagaaactcgtctcggatcctgctcctgcactgcttacacctataacagtagcgggtgctctatctggcatggggaattgctt

SEQ ID NO: 8179 - DNA, 484 bp, Triticum aestivum
  Clone ID: uC-tsrow189033e08b1
tgtctctccggccaaatcaatccacccgccggcggcgagcacggagacagaggggtaggagccgacagccgaggcagtccaccaccgcgccatggcgccgcccccgagcaccagcgcccccgacggcggcctggatcccagggacgtgtgcgtcgtcggcgtcgcccgcacgcccatcggcgccctgctcggctccctctcctccctccccgccaccaggctcggctccgtcgccatccagggtgctctccggcgagccagcgtcgacccggcgctggtgcaggaggtgttcatgggcaacgtcctcagcgccaacctcggccaggcccccgccaggcaggccgccctcggcgccggcctgcccaacaccgtcccctgcaccaccgtcaacaaagtctgctcctcggggatgaaggctgtcatgcttgctgtgcagtcgattcagctggggatcaacgacgtcgtggtcgccggcggcatggag

SEQ ID NO: 8180 - DNA, 457 bp, Triticum aestivum
  Clone ID: uC-tsrow189033e09b1
cttacgcgtccgctcacctcctggtccttctaccgggcggggatcgccgagttcctggccaccttcctcttcctctacatctcggtgctcaccgtgatgggcgtggtgggcaacccgtccgggtccaagtgcggcacggtcggcatccagggcatcgcctggagcttcggcggcatgatcttcgtgctcgtctactgcaccgccggcatctccggcggccacatcaaccccgcggtcaccttcgggctgttcctggccaggaagctgtcgctcaccagggccgtgttctacatcgtgatgcagtgcctgggcgccatatgcggcgccggcgtggtgaaggggttccagaccacgctgtaccagggcaacggcggcggcgccaactccgtcgcgcccgggtacaccaagggggacgggctcggcgccgagatcgtcggcacgttcgtgctggtgtaca

SEQ ID NO: 8181 - DNA, 320 bp, Triticum aestivum
  Clone ID: uC-tsrow189033e12b1
acgtttgcgtccgggcagtcttggcaaagtatatacgccaacccgctcgatccctgcactccgtatgctacctgtgggccattcacggtctgtactggtaattcacatccttactgtgactgtatggagggattctctcagaagtcaccacatggttgggaccttgatgatcgaacaggagggtgcatcagaaatactccattgcagtgcactagcaagaagaacacgataaattcaacggacaagttccaccccattgctcgtgttacattgacctatgaaccccgaagcatgggcaatgctaccactcagagcgaatg

SEQ ID NO: 8182 - DNA, 450 bp, Triticum aestivum
  Clone ID: uC-tsrow189033f01b1
gttgtcttcgtactcgcctctctccgcgcaaccgagccttccgcccacctcctccccatttcgccagcggcgcacccaccaaccacccccacccgccgccatgagggagtgcatctcgatccacatcggccaggccggcatccaggtcgggaacgcgtgctgggagctgtactgcctcgagcatggcattcagcctgatggccagatgcccggtgacaagaccgttgggggaggtgatgatgctttcaacaccttcttcagcgagactggggctgggaagcacgtcccccgtgctgtcttcgtagatctcgagcccactgtgattgatgaggtgaggactggcgcttaccgccagctcttccaccctgagcagcttatcagtggcaaggaggatgcagccaacaacttcgcccgtggtcattacaccattggcaaggagattgttgatct

SEQ ID NO: 8183 - DNA, 385 bp, Triticum aestivum
  Clone ID: uC-tsrow189033f02b1
ctacgcgtccgcccacgcgtccgatcggatcggggaaaaggcctccacgagctctcgtctggactgccgccgccgcccgagatggcgatccgccgtgggccctcctgcgccgccctcgccctgctcgcgctggcctccgtcgccgcggtctccgccgacgtcttcttccaggagaagttctaagatggttgggaaagccggtgggtcaagtctgagtggaagaaggatgagaacatggctggtgaatggaaccacacatctggaaaatggcatggagatgctgaggacaaaggtatccaaacctcagaggactacaggttctacgccatctcggcggagtaccctgagttcagcaccaaggacaagacacttgtgctgcagttca

SEQ ID NO: 8184 - DNA, 446 bp, Triticum aestivum
  Clone ID: uC-tsrow189033f06b1
tttacgcgtccggtccgattcgaaatactgcttgcccagctagggttttgctgcctccgccgccgcctcccggcagcgtcgtccccccatggcgctgccgaaccagaacaccgtcgattaccccagcttcaagctcgtcatcgtcggcgatggcgggactggcaaaaccacttttgtgaagaggcatctcactggagagtttgagaagaaatatgagcccactattggtgttgaagttcacccattggatttcaccactaactgtggaaagatccgtttctactgctgggacactgctgggcaagagaagtttggtggccttagggatggatactatatccatggtcagtgtgcgataatcatgtttgatgtcacttcaaggctgacatacaagaatgttcctacgtggcacagggacttgcgcagggtgtgtgagaacatcccca

SEQ ID NO: 8185 - DNA, 451 bp, Triticum aestivum
  Clone ID: uC-tsrow189033f08b1
ttgcctttcaggttcacgcgccgcccggcagaaagaaaggagaaaggaagaggaacaaaggcggggagggtgccccggccccggcacagctgctggattcggggcggcgggcggcggtccacggaatccggccggattgcgcgtgaattcagagcagtcgaggcatgccataagaagagcagggggagcaaatgtggcgtctcttcaacgagctgtgggacgttctaggatccgggtttttctcgtccaggttcctataagcctaacaagtcagcgactcgcctctcccgtcgcatcaaatcaagtccatccatccattgcatcggtccatctggtcggtcggcatggacgaggaggattactcgtgggtgcggcggacgaggttctcccactccgtcgtccgctccaactccggcagggagcagttcggcgccttcgtcgagcagttcaa

SEQ ID NO: 8186 - DNA, 421 bp, Triticum aestivum
  Clone ID: uC-tsrow189033f09b1
tttcacgcgtccggagccgagctcctcgcgattcccaatccccgcacgcctcctcgccctcctcctccggccccgccgccgccgccgcctcgccacaggctcacggttattcaagatggaacacaaggaggcgggttgccagcagccggagggcccaatcctatgcgttaataactgtggcttctttggcagtgcggcgaccatgaacatgtgctccaagtgccacaaggagatggtcatgaagcaggaacaggccaagctggctgcctcctccttcgatagcatcgtcaacggtggcgacggtgggaaagcacctgttgttgcggctgtagccgcgagcgcagaggtggtggttgctcaagttgacgtgaaggcgctcgttgtgcagcctgctgctgatgttgcaggcaccagcgaagct

SEQ ID NO: 8187 - DNA, 462 bp, Triticum aestivum
  Clone ID: uC-tsrow189033f10b1
tctaccgcaagcgccctccgaaccaaatcgaacaaccgagagaagccatggagcgacttcagcggatcttcggcgccggcgggatgggccagccgccgtcggactcgccgttgctcgactcctccgagcaggtctacatctcctccctcgccctcctcaagatgctcaagcacgggagggccggcgtgccgatggaggtcatgggcctcatgctcggcgagttcgtcgacgactacacggtccgggtggtcgacgtcttcgccatgccgcagagcgggacgggggtcagtgtcgaggccgtcgaccacgtcttccagaccaatatgctcgacatgctcaagcagaccggcaggccagaaatggtggtagggtggtatcactctcatcctggctttggctgctggctatcgggtgttgatatcaatactcaacagagtttcgaagctttgaaccccagggcag

SEQ ID NO: 8188 - DNA, 418 bp, Triticum aestivum
  Clone ID: uC-tsrow189033f11b1
ttttcgcgtccggtggagaagtgcctgagggatgccaagatggacaagagcactatccatgatgttgcgcttgttggtggttccaccagaatccccagagttcagcagctgctgcaggacttcttcaacgggaaggagctctgcaagagcatcaaccctgatgaagctgttgcctacggtgctgccgtccaggctgcaatccagcggtgaggggaacgagaaggaacaccaccatccccaccaagaaggagcaggtcttctccacctactccgacaaccagcctggtgtgctcatccaggtgtttgagggtgagaggacaaggaccagggacaacaacctgctcggcaagtttgagctctctggcatcccgcctgcgcccaggggtgttccccagatcactgtctgcttcgacattga

SEQ ID NO: 8189 - DNA, 399 bp, Triticum aestivum
  Clone ID: uC-tsrow189033g01b1
ctgtcgcgtgggtgacaagcgtgtgatcgagaggttcgagaaggaagccgccgagatgaacaagaggtctttcaagtacgcctgggtgcttgacaagctgaaggccgagcgtgagaggggtatcaccattgatattgccctgtggaagttcgagaccaccaagtactactgcaccgtcattgatgctcctggtcaccgtgacttcatcaagaacatgattactggtacctcccaggctgactgtgctgtgctcatcattgactccaccactggtggttttgaggctggtatctccaaggatggccagacccgtgagcatgccctccttgctttcactcttggagtgaagcagatgatctgctgctgtaacaagatggacgccaccactcccaagtactc

SEQ ID NO: 8190 - DNA, 351 bp, Triticum aestivum
  Clone ID: uC-tsrow189033g02b1
attacgcgtccgagccaggctcgctccccccgtcgcgccccagcttcccagcaccatccagatccgcgcctgctgccatggccgacccaggagacgagcagcgcgcgggcctgctcgccgcggcgtacctcttccccgtgcccgacggcgcgaccttctcctacgggacggtgggattccgtgccgacgggagcaccatggcccccgcggtgtgccgcgccggaatcgtggcagcgctgcgctccgtgaagctgggcggcgccgccgtcgggctggtcatcacggcgtcgcacaaccccgtcggcgacaacggcgtcaagatcgtggacgccgacggcggcatgatgtcgc

SEQ ID NO: 8191 - DNA, 452 bp, Triticum aestivum
  Clone ID: uC-tsrow189033g03b1
attgagtgctggtgttgcggagtcggggaagatatgttcagaaaaagttaccagcagatccaagactcaggaagacttaatcaagtcaatttataatttctcagtagtgcttctatctacttgcgatggcggttatgagttggaggaatctgaacatgcacttgttcaatctacaatacacaatctcagttctttgagttccaagataagcaaggctgcattaaaaaatgatgatgtaaatggaaactgctgccaaacaaaatcagatacaaggtgccatggaaagaatcatcagcctcagaagtttgatggacttgactgggagaacattggtgcagattttaaaacatttattttggaggatcttactaaacttccagaagagaatgtcattggtgatactaaagatgcacaaatgctgatatataagaatctatggattgaagctgaag

SEQ ID NO: 8192 - DNA, 312 bp, Triticum aestivum
  Clone ID: uC-tsrow189033g04b1
gtacactccctcgcatcggctttccgccggtggatccccttgacgagccgccgcgccggcgcaccggcatccggctgctatacctccctcgccgtgctgtgggccgacctagaggcatgcctcgcggggtgtgtctttcagctggcataccacccctgactgggctccccgtcgcctcggcacggcagcaggcggcgctccccgtcagcgcggtatggcagcaggcggatccggcgagatcgcagacgctccccttactcctgccggagaaaaagtccgtctccttctgctagatgggacaggagccagccc

SEQ ID NO: 8193 - DNA, 266 bp, Triticum aestivum
  Clone ID: uC-tsrow189033g06b1
atttaaatcaatttgctcaaactcgcccagttcgcggccatagggtcgcgccaatatcccgacacggatgccgccatcaccttcctcgaggggataatcacaaagcttcgtgagaccagggagctgctgatcaatgagcctatccttcacgtcaagatgcagatcgcggcaattcacgctggacaaaggcaaccatcacgagcgcaagaacctgcaagaggaagggaagaccaccctggatggcatgactgatgtggatccaacag

SEQ ID NO: 8194 - DNA, 427 bp, Triticum aestivum
  Clone ID: uC-tsrow189033g07b1
tgtgacagttgattctggaaagcccaaggacgaagcagttgcggacatggacgatgtcgctgcatgctttgagttctatgctggtctggctgaagccttagatggtaaacaacatgcgccaatctctctgcccatggaagaattcaagacctatgttcttaaagaacccatcggggtttttggactcatcactccctggaactatcctctgttgatggctacttggaaggttgcacctgccctggctgctgggtgtacagctgtgttaaaaccatctgagctggcttctctaacttgcttagagctcggcgcaatatgtgaagaggtaggactgccttcaggagttctgaacataattactggtctgggccctgatgctggtgctccaatagcttcacatccccatgtggataagattgcttttaca

SEQ ID NO: 8195 - DNA, 452 bp, Triticum aestivum
  Clone ID: uC-tsrow189033g08b1
tccgcgtgggggagaaggaaacccatcttcgcgagatcccgtcgggcgccgacggggccggcgcggcgatggtgcggccggcgggcctcctcgacccggcgacgaggcggcgcccgttcctcgaccagcgccgcccgtccttccggcgccgctggcagcagcgcccgctctgggcccgcctcctgctctcgctcctcctcgccctcgcctgcgccctcctcctcctcggcctcgccggctcccccgacccctcctccccgccctccaccgacgcctcctcctccggatccgccgacgccgacgccgatgccgtctcctcccctctcctccgccagagatcttacctcgaggttatcacggacacgcagaacatgacggacgaaatgatgagcgctcactcgctttcccgccagctcatggaccagatttctctcgcaaagacctacatcacg

SEQ ID NO: 8196 - DNA, 387 bp, Triticum aestivum
  Clone ID: uC-tsrow189033g09b1
gtggaggatgtcgggccgcggcaagggaggcaaggggctgggcaagggcggcgcgaagcgccaccggaaggtgctccgcgacaacatccagggcatcaccaagccggcgatccggcggctggcgcgcaggggcggcgtgaagcgcatctcggggctcatctacgaggagacccgcggcgtgctcaagatcttcctcgagaacgtcatccgcgacgccgtcacctacaccgagcacgcccgccgcaagaccgtcaccgccatggacgtcgtctacgcgctcaagcgccagggccgcaccctctacggcttcggaggctaggccgagggttcatcgatccagctcgcgacgccgccgtccgaccgagagtagtagtgctatctatctag

SEQ ID NO: 8197 - DNA, 447 bp, Triticum aestivum
  Clone ID: uC-tsrow189033g10b1
ttttaatccctcgcatcggctttccgccgttcgttcccctctccgagtcgccgcgccgccgcatctgcatcctgctcctatctatccctccccgcgcggagggcccacggagaggcatgccgcgcgtggtgtctcgttcgccgccataccaccgtcggcggcgctccccgtcgccgcggtacggcagcaggcggcgctccccgtcgccgcggtatggcagcaggcggatccggcgagatcgcagccgctccccttactcctcccggagaaaaagtccgtctccttctcctagatgggacaggagccagtccccgattcctaggaggcgtagaagccctgcatcaccgatgagacatagaagacggaaaagtcggagcagctcaagttctcttgtaaataactccagcccaagtcatggatctgaacagaacagtttaatagaaaaac

SEQ ID NO: 8198 - DNA, 537 bp, Triticum aestivum
  Clone ID: uC-tsrow189033g11b1
tctttaatcaatttgctcaaactcgcccagttcgcggtcatagggtcgcgccaatatcccgacaaggatgccgccatcaccttcctcgaggggataatcacaaagcttcgtgagaccagggagctgcggatcaatgagcctatccttcacgtcaagatgcagatcgcggcaattcacctcgacaaagggaaccacaaggagtgcaagaacctgctggaggaagggaagaccaccctggatggcatgactgatgtggatccaacagtccacgctagcttctactgtatatcgtctcagtaccataagtcgctccaagagtttgctgagttctataagaacgcacttctctatctggcctacacaaccgtagggtccctctcagagtcattcaagctggacttggcatttgacctttcccttgcagccttgctgggggacaacatctacaacttcggggaattgttagctcaccctattatcaatagtcttattgggaccaaggtggagtgggtctatcacatgttacaagcgttcaac

SEQ ID NO: 8199 - DNA, 411 bp, Triticum aestivum
  Clone ID: uC-tsrow189033h01b1
gttaggttgcacctgccctggctgctgggtgtacagctgtgttaaaaccatctgagctggcttctctaacttgcttagagctcggcgcaatatgtgaagagataggactgccttcaggagttctgaacataattactggtctgggccctgatgctggtgctccaatagcttcacatccccatgtggataagattgcttttacaggaagtaccgcaactggtaagacgataatgaccgctgctgcccaaatggttaagcctgtttcattagagcttggtggcaaaagtcctcttgttatctttgatgatgttgctgacattgacaaagctgttgaatgggccgtgtttggttgttttttcaatagtggtcaagtttgcagtgcaacttctcgtctacttctccatgagaaaa

SEQ ID NO: 8200 - DNA, 408 bp, Triticum aestivum
  Clone ID: uC-tsrow189033h02b1
gttttctcctcctaaaccactctccctatccccgtgtccagaagctaccccccggctccaatggcggcgaaggaaccgatgcgcgtgctcgtcaccggcgccgcaggacaaatcggatatgctcttgttcccatgattgccaggggagttatgcttggtgcagaccagcctgttattctgcatatgctggatattgaatttgctgctgaagctcttaaaggtgtcaagatggagttgattgatgccgcatttccacttctcaagggagttgttgcaacaactgatgttgttgaggcctgcactggtgtgaatgttgcggctatggttggtggattccccaggaaggaaggaatggaaaggaaggatgttatgacgaaaaatgtttcaatctacaaagctcaagcatct

SEQ ID NO: 8201 - DNA, 388 bp, Triticum aestivum
  Clone ID: uC-tsrow189033h03b1
ttcttggtgactacttaggcgtcaaggtgcatgcttgtgttggtggaacttctgttcgtgaggaccaaaggattcttgccagtggggtgcatgttgttgttggcacacctggtcgtgtgtttgatatgttgcgcaggcaatccctccgcccagataacatcaagatgtttgtgttggatgaagctgatgagatgctttcacgtggtttcaaggatcagatctatgatatcttccagcttcttccatcaaagattcaggttggggtgttctctgctaccatgcctcctgaggcccttgagattacccgcaagttcatgaacaagcccgtgaggattctcgtcaagagagatgagcttacccttgagggtatcaagcagttctatgtcaa

SEQ ID NO: 8202 - DNA, 248 bp, Triticum aestivum
  Clone ID: uC-tsrow189033h04b1
cttatgcgtccgctctcgaccaccccgccccagtaatattcttgttgctcggccttcactagccgcccaaccactccgaccaaggcgcaccgtaccatcacacgctcgacgggttccgacgtctagcgacgatcctctgctggtgctggtgctgcagggggctccgccccgcggctgaggggcacgaccagcatcaagaggggggcgacaacgcggcgggagctgcgacacatgcctctgcgggggac

SEQ ID NO: 8203 - DNA, 184 bp, Triticum aestivum
  Clone ID: uC-tsrow189033h05b1
tatcatagcactctggacattgcccaccgtgaggcccctaaagggttcctacagctattttctgcactcaacccaatgccctgtcagcttcgatgtatgcagtatgcacccagaagaaatatctctccagagtggcctcctatggagcgggcgctctctttggattgcttgatccttcgagcta

SEQ ID NO: 8204 - DNA, 361 bp, Triticum aestivum
  Clone ID: uC-tsrow189033h06b1
gtctaccttgcctccagcttctctgagggtgttcgtgctcgcaacatctgcccttctgtgccatcctatgagaggcgcttcaccacaagcagctacatgactcagaaccttggcatcagtgtcccaatgatgtcatcttctccattgattgccaatgcaccccctgagaagaaaggtgtcaagaactttgcgattgacttcctcatgggaggagtgtcagctgcagtttccaagactgctgcagctcctattgagcgtgttaagctgcttatccagaaccaggatgagatgatcaaggctggcaggctctctgagccatacaagggtattggtgactgctttgggcgcaccatcaaggatg

SEQ ID NO: 8205 - DNA, 387 bp, Triticum aestivum
  Clone ID: uC-tsrow189033h07b1
ttttacgcgtgggcggacgcgtggggcttccagtatgtcctggctcatttggacggcaggcagctgctcatcaagtccaaccctggcgaagtggtcaagcctgattcattcaaggcgatcaacgatgagggcatgcccatgtaccagaggccgttcatgaagggcaagctgtacatccacttcacggtggatttccccgactcgctgaacctggaccagtgcaaggcgctcgagactgtcctcccgcccaagccggcgtcgcagtacacggacatggagctggacgagtgcgaggagacgatggcctatgacatcgacattgaggaggagatgcggaggcggcaacagcagcaggcacaggaggcctacgacgaggatgaggacatg

SEQ ID NO: 8206 - DNA, 411 bp, Triticum aestivum
  Clone ID: uC-tsrow189033h08b1
tttttatatgtaaggtggatagtttgaggttttgtttatcatgaaaaacaagggattagcaagtttgagctcggtggtagaattgctcaatgagatcgtgaataggagcatgattcaaccaattgacatcaatgttgataaaggcatggaaaaatcttatcgtatacatgatatggtgattgatttcatatgctgaagaaaaacacttctgtggcatggagtgaaagcggtctatccaaaggcaagatgtgaagattatccatctgaaagagcatgacaggtagcagcgatgtgacaatgaggtctcttgcaattgttgattcagtgtagcttatgttgaattttccaagttctacatgcgctggattagaatattgtgctgcatgtctctattctttgcaatcacaatga

SEQ ID NO: 8207 - DNA, 131 bp, Triticum aestivum
  Clone ID: uC-tsrow189033h12b1
gtttaccttggctccagattatctgagggtgttcgtgctagcaacatctgccgttctgtgccatcctatgagaggcgcttcaccacaagcagcttcatgactcagaaccttggcataagtgtcccaatgat

SEQ ID NO: 8208 - DNA, 372 bp, Triticum aestivum
  Clone ID: uC-tsrow189034a01b1
gttacgcgtccggaaaatcaacaagatcaagtggggccaaacagccaacaatgctctctttatcttgtctacaaatgacaaaacaatcaagtactggaaggtgcaagacaaaaaagtgaaacggatttcagtaatgaatttggatacttcccagagtgcagacaatgggacaacttctagttcgagtaccaatagctctagaggtcttcctaatggaggatcctcagaaaagtcatacaattgtgcaaacaatgatctgccattccctcctgggggatatgcatcattgcgtttgcctgtggttacaggccaagagttaaaccctgtcgctagatgaccgcgtgtatatgcacacgcccatgattaccatat

SEQ ID NO: 8209 - DNA, 318 bp, Triticum aestivum
  Clone ID: uC-tsrow189034b09b1
tccacgcgtccgccacgcgtccgcaagttgggtgacaaaggttactacatccagccaacaattttctcagatgtgcaggatggcatgaaaattgcccaagaggagatatttgggcctgttcagtcaatcttcaagttcaatgacctcaacgaggtgatcaagagggcgaacgcaagccagtacggattggctgccggtgttttcaccaacaacctggacacggccaacaccttgacgcgtgccctcagggccggcacggtctgggtgaattgctttgacatcttcgacgcggcgatccccttcggcgggtacaagatg

SEQ ID NO: 8210 - DNA, 220 bp, Triticum aestivum
  Clone ID: uC-tsrow189034d09b1
tttgacgcgtgggggacgcgtggggtccatgtcatgcccgcacgtgagtggcataggcgagctgcttcggcaggcgaggccggagtggaaccccgccatgatcaagtatggcctgatgaccaccgcgtacaacatggacagcgccggtggtgtcatccgcgacatgtgcaccggccaagtgatcacgctattcgcacgaggggctagacacgtgcacccc

SEQ ID NO: 8211 - DNA, 241 bp, Triticum aestivum
  Clone ID: uC-tsrow189034f03b1
ttcttctccgactacttcgagttcagcttcccccctggcgtcattgtgcagccgtacgtcgagagggtggtgctcgtgtaccacaacctgggcgagctctcggagaagtactacccgctccccggctacacctacctctcgcccattctcgggctgctggtctacgacgctgccaacttgtcagcggtggggttgtctgagctgagcatcgtcgcgtcagggagcccgatttctgtgagtt

SEQ ID NO: 8212 - DNA, 384 bp, Triticum aestivum
  Clone ID: uC-tsrow189034g06b1
tccacgcgtccgggcggattacagagaagcttgagttcaggaagtacgatcctcgtgtaaacaagcatgttctatttacggaagccaagatgaagtgagacagtgcagcctttttttattcttgacataagacctctactgttcattttcgttgaagacaatgctacctttattagcctgttccagatttgagagtttcatgtgggcaccaaatcagcatggatcttgctctgcctgcctgtttatttgtattgtaagtttgtaactgaaatgagctgcaagcctgcaaaagtactgcccatctagtgttgtgatgattatcatgtggatgcttggttctgaaacttaaagcagccacagatcaagggtagagggtctgaacca

SEQ ID NO: 8213 - DNA, 415 bp, Triticum aestivum
  Clone ID: uC-tsrow189034g07b1
ttccagtccaatccaccctgttcacgtccctgatggtgaggtggatgattctcctcgtaacggatccagccgagggcttgttcttaatccgctgcccatgaggatcacagggggttgaaaatccacgccaaactgaacaaggtgaggatgtcaacatcttcgaaagtggatcagaggagattagagagcatcgaggggattttgagttgcggcggacttgatccccttcggtcctctttaatccacacgaaacagaaggcctagaggatatccacgtctctgaatcagcatatgcaaattcaaccgcccaagaattaccagggcaccaagtacgtccgagctggttgttccacgttttatccggagtttccagatgactggtataacatcgaggacccttccatgcccaaggaca

SEQ ID NO: 8214 - DNA, 425 bp, Triticum aestivum
  Clone ID: uC-tsrow189034g11b1
tttttccctctccctcctgctgctgacaagatgaaaatggctggctctgctgtgctgctcatttcgctcctgtcggctgtcgcccccctaccctctgaagccctcaacgtgagaggccatctgctgaaatcaaagacgttccgttctccgcccatcttattgggacctggatcagtctcaaacaagtaccaccatgatgtcgacttcccccgaggccaccttgcagtcaagagctttgatgcagaggtcgtcgatgagaatggcgtccctgtcccgctccatgagacttacctgcatcactgggttgcagaaccatactatgctctgaagaacagtcagagccccgatacgcaaaatcttccaaaagggatgcttaaaaggaatgatggagtgtgcaagaccacactaggccagtactttgggct

SEQ ID NO: 8215 - DNA, 456 bp, Triticum aestivum
  Clone ID: uC-tsrow189034g12b1
ttctcacgcgtccgggaacgcccacgagcaatggatgcgagacaggggtacatgattcggttcgacggccacttcgagttcgaggacccgtcgaccgccgagccgccgccgcctccgttcgcggccagggcgatctcgtctgagcaggagcatacccccatggtcgccgcgctgctgcacgtcatctcagggtataccacgccggtgccggacttcttcttcccagcgagcaaggaggtgtgcacggcgtgcgggatggatgggtgcctcgggtgcgagttcttcggcgcgggggccaggccggcgatcgcaccgaaggcgacggtgggcgggccgcagaggaggcggagaaacaaaaagacccagtaccgcggcatcaggcagcgaccgtggggcaagtgggcggcggagatccgcgacccgcgccgcgccgtgcgggtgtgactcgggaccttc

SEQ ID NO: 8216 - DNA, 173 bp, Triticum aestivum
  Clone ID: uC-tsrow189034h01b1
ttttctgtggctcaaataattcaagcagcaaaagtgttaatagagctagcaaacatgctgccctcagttttgttaaacgcacgatggcacgttgccaaatctacgaagaggcaggaacaagctggtttgatgaagcccctttcaaggatttgtttattttagcaacttcacac

SEQ ID NO: 8217 - DNA, 146 bp, Triticum aestivum
  Clone ID: uC-tsrow189034h02b1
gtccctgcgtcgggtgcacacttctctgccaccccgatttttccctccctcccctgttcctcgccttatctgcatagccgactgctgcttcagcttgggcttagctagccagggaacgaggaggagcgggttgttgtcatggcggg

SEQ ID NO: 8218 - DNA, 437 bp, Triticum aestivum
  Clone ID: uC-tsrow189034h12b1
tttggcaatgaaggtaacaggccaatgcctccacaaacgagaggagaccatcatgcttggcgtactgctgttggtactcatggtgctagaccacattctagtgttgaaggccgtggccattttaatcacacttggcaaaatcatcagacgtttggtacgagagaaaacacaagtatgccacacggcgttgggcccagaacttttgtcagaccaatggcacatctgccccctactcttgggtacctcaatggaccatcataccctgggcctatgcctaccatgtattattacatgcctgctccacccatggaggcaatgagaggtccacctcgttttgtccaaaaccaaccagccccccaacctgttttatcgcctgaagcgactgagctaagagctaatatattagctcaagtggagtactatcttagtgatactaa

SEQ ID NO: 8219 - DNA, 270 bp, Triticum aestivum
  Clone ID: uC-tsrow189035a01b1
tgttttcctccgcctccccgtctcgctcgctcccacctctcgccgccgccgccgccgtccgcgcagccgcaaaatgccgttcaagaggttcgtggagatcgggcgggtggccctggtgaactacggcaaggactacggccgcctcgtcgtcatcgtcgacgttgttgaccagaacagggcacttgttgatgctccggacatggttcgctgccagatgaacttcaagcggctctctctgaccgacatcaagattgacatcaagcggatccc

SEQ ID NO: 8220 - DNA, 186 bp, Triticum aestivum
  Clone ID: uC-tsrow189035a02b1
cacgcgcatcccccgaaagggaatcgggttaagatttcccgagccgggatgtggcggttgacggcgacgttaggaagtccggagacgccggcgggggcctcgggaagagttatcttttctgcttaacggcctgccaaccctggaaacggttcagccggaggtagggtccagtggccggaagagcac

SEQ ID NO: 8221 - DNA, 89 bp, Triticum aestivum
  Clone ID: uC-tsrow189035a04b1
tctctcggccgctgaggtttccgccgcgatctcgtctcgctacgcactctctatctgagatctggaatcgggcgaggcctgcagctcct

SEQ ID NO: 8222 - DNA, 266 bp, Triticum aestivum
  Clone ID: uC-tsrow189035a05b1
ttttccacgcgtccgcccaaggatgtcaacgctgctgtggccaccataaagaccaagcgcactatccagtttgttgactggtgccccactggctccaagtgtggtatcaactaccagccacctggtgtcgtcccaggcggtgaccttgccaaggtccaaagggctgtgtgcatgatctccaactccaccagtgttgtctaggtcttttcccgcatcgaccacaagtttgacctgatgtacgccaagcgtgccttcgtccactggta

SEQ ID NO: 8223 - DNA, 239 bp, Triticum aestivum
  Clone ID: uC-tsrow189035a07b1
tttctaaggactgactgccagcgcctgtccgtgatccaaatcctcccgggaaagttcttggttgatctcttcctcctcgaccgcctcccagggtatgctcccctgctctgattcttggttgatctctatggtctgttgctgatctgcagttaagttatgtattagggcccccttctagggagaggatctgtatgattatggatcgatcctgttcgtcttccgtggttctttcttaagcc

SEQ ID NO: 8224 - DNA, 303 bp, Triticum aestivum
  Clone ID: uC-tsrow189035a08b1
tctccacgcgtccgcccacgcgtccgcggacgcgtggcgctggttcaaagaagctgcccaagggccaaggacgagccgcattgtagactgcctggactcactcatgaagccagcgtttggacagattagatgttgcgtaaacagtttagtttcggatatccggatcggtatcgcggcatggccgctcttttctaccttctcttagatcacattgtatcactcaccatgtcctgtcaacatgacccaccgttcttgtacaagtttgtgggtgtgggtagagctgtagacagtttggcacaacct

SEQ ID NO: 8225 - DNA, 251 bp, Triticum aestivum
  Clone ID: uC-tsrow189035a10b1
ttcttccacgcgtccgcccaaggatgtcaacgctgctgtggtcaccatcaagaccaagcgcactatccagtttgttgactggtgccccactggcttcaagtgtggtatcaactaccagccacctggtgtcgtcccaggcggtgaccttgccaaggtccagagggctgtgtgcatgatctccaactccaccagtgttgtcgaggtcttttcccgcatcgaccacaagtttgacctgatgtacgccaagcgtg

SEQ ID NO: 8226 - DNA, 359 bp, Triticum aestivum
  Clone ID: uC-tsrow189035a11b1
tttccacgcgtccgctgcctgaaatccgcgccgctccctccagcccaccaccgcgctctaggtcgtcgcggctccaatggtgaccaggtggagccagaagagccccggcctcaagatcctgtggatctggacactgggcaccgccgcgatcatgatcacgaacgtcgtccggacgcgcgtcaacgatatgcagatgatcctccgggaggaagacgaagccgtcggctctggcggcggcggcacgggcggcgggccctccggcgagcgcgtcatgagggacgacgagttgaattgagcagcaagtgaagaagagttcgcttgagcttgagcgactctacatagcaaaattcgcggaagcc

SEQ ID NO: 8227 - DNA, 398 bp, Triticum aestivum
  Clone ID: uC-tsrow189035a12b1
gcgattacacaccagcacgcggcacgcgcccgagacgctcgtacgggccggcgcaccctagccgggccgcgatgcccacggctaacgtgcgcgcggcgcagactagcgccgaccgcaggttaagtacgctggtgcgccacctgctggcttcttgcccacgaacatgagcagcgaccgccacctccgccgactcgctccaacctttccccaccatggcagtcgccctccgtcttcgccgggatcgcgcagggcccggaggaccccatcctcggggtgacggtcgcgtacaacaaggatcccagccccgtcaaggtcaacctcggcgtcggcgcctaccggaccgaggaagggaagcccctcgtgctgaatgtggtcaagcgcgccgagcagatgctgat

SEQ ID NO: 8228 - DNA, 307 bp, Triticum aestivum
  Clone ID: uC-tsrow189035b02b1
tgttgcagccgcggggacgatggtcgggatcttctccaggttctcttccggcgccggccaccgccgcgccaagagtgccgtggaggttgtggagacattggcgcccaacatggagaccggggagtctgacccggcagctgatcctggagatagcccgcacggcattgaggtcggcatcgagttcaagccggtggagcaccctgtggagcctgtcaaccttgaccaaccagtgaaatgcccgctttctgagccatctatactgcatgatgggaggatatggcaagagaggatgtctacagcgggcggg

SEQ ID NO: 8229 - DNA, 188 bp, Triticum aestivum
  Clone ID: uC-tsrow189035b04b1
tgtttaggttgaggcgaccaaggaggaggcgccgggcgccgctgagacggaggaggccaaggagaccgagccagcagctgctgtctagccggatgccgaggcgcccaaagagccagaggcgccagccgtggtcgagacagagaccaaggaggccgtggcagaggccgagccggcggtggtcgatgagg

SEQ ID NO: 8230 - DNA, 166 bp, Triticum aestivum
  Clone ID: uC-tsrow189035b05b1
tgtaaagggctcatgcctagcgccagccatgggtctgcaatcgaggtgctatccaggatcacgatccccacatgcgattatatccccgggaatcctgagacaaggctgttgatgcgcatcacaggtctgctcccatggctcgggttgcagctcaccaaggacgtat

SEQ ID NO: 8231 - DNA, 319 bp, Triticum aestivum
  Clone ID: uC-tsrow189035b07b1
tgcctcctctcttcgccgctcccgctccgccgccgcgccaccgccgtcagccatggcaccgaagaaggagaaggccccggcggcgtcgtcgaagccggccaagtcgggcggcgggaagcagaagaagaagaagtggagcaagggcaagcaaaaggagaaggtgaacaacgcggtgctcttcgaccaggccacctacgacaagctgctcaccgaggtgcccaagtacaagcagatcacgccctccgtcctctccgagcgcctcaggatcaacgggtcactggctcgcagggccatcaaggacctgatggagagggggctc

SEQ ID NO: 8232 - DNA, 418 bp, Triticum aestivum
  Clone ID: uC-tsrow189035b09b1
tcccacgcgtccgcaccactgcactacactggtgcggtacagaggaagcagcagaggagcaacgcacgaacgagctggcggcatggcgaggccgtacatctccctgcacctctggctggccgtcctggccatggccgacgccgcgtccgaggccgggttctacgaccagttcgacgtggtcggctccggcaacaacgagcgcgtgaacgacgatggcctggcccagcaggtggcgctcacgctcgaccagggcaacggcggctccggctacagctccaaggacaagtacctctacggcgagatcagcgtccagatgaagctcatcggcggcaactccgccggcaccgacacctccttctacctgacgtatggggagggcgacagccatgacgagatcgacatcgagttcatgggcaac

SEQ ID NO: 8233 - DNA, 319 bp, Triticum aestivum
  Clone ID: uC-tsrow189035b10b1
tgaaagggctcatgtctagcgccagccatgggtctgcaatcgaggtgctatccaggatcacgatacccacatgcgattctatatttgggaatcctgagacaaggctgctgatgcacatcacaggtctgctcccatggctcgggttgcagctcaccaaggacgtatcttccctcgggtcagcttcgcctctacaagaacagaaccagaaggcctactatgtggcatccaatatctcaggatggtgccgtgtgaaatctcttcatgtcctagccgaggtcttcagagcatactcttatggggaaatcatctcactggaaga

SEQ ID NO: 8234 - DNA, 378 bp, Triticum aestivum
  Clone ID: uC-tsrow189035b11b1
gttttgctgcctccctcccccaccgccgccgtcgccgcccgcgtccaccatggcgctgccgaaccagaacaccgtcgattaccccagcttcaagctcgtcatcgtcggcgatggcgggactggcaaaaccacatttgtgaagaggcatctcactggagagtttgagaagaaatacgaacccaccattggtgttgaagttcacccgttggatttcaccactaactgtggaaagatccgtttctactgctgggacactgctgggcaagagaagtttggtggccttagggatggatactatatccatggtcagtgtgcgattatcatgtttgatgtcacttcaaggctgacctacaagaatgttcctacgtggcacaggga

SEQ ID NO: 8235 - DNA, 380 bp, Triticum aestivum
  Clone ID: uC-tsrow189035b12b1
tctccagccaccactttcaagctcacaatcaagtcgatcacgacccacaggtcaagcaagcttcgttgctagcttgcttgtccggcgatttctgcttcatctagctaccaacgtgcggagatgccgaggtcgtccaagaagaagcagcggtcggcgtggggctcgctcctgggcagctgcctgggcgggggcggctggaagacggggaagcaggtccggcccggccccggcccgaggaagcgcgagtcgtcgtcggcggcggtgggggccggagtcgggcagcggctgtcgttcacggacgtgatgagcatgagcgcggcgtcggagcaggagctgtccgtgtcgctggttggctccaacctgcacgtgttcacggtcgc

SEQ ID NO: 8236 - DNA, 277 bp, Triticum aestivum
  unsure (1)..(277): unsure at all n locations
  Clone ID: uC-tsrow189035c01b1
tccttgttccattctcttcctccgggagcgccgccgcttcctcatctctcacctctcggctcgggagaccgaagcgaaaccccaaggaactatagtcccagtgtgacattcaaaagcagtcaagatggtgaagttcacagcggaggagctccgtggaattatggataaaaagaataatattcgcaacatgtctgttattgctcatgttgaccacggcaagtctacgcttacggattcccttgtggcagctgctgggattatcgcccangaagttgct

SEQ ID NO: 8237 - DNA, 400 bp, Triticum aestivum
  Clone ID: uC-tsrow189035c02b1
tgtgcatagctggcaactatctctatgcgtggcggatggtctctgggctgggctagtcattggatttatcacagagtactacacaagcaatgcatacagacctgtgcaggatgttgctgattcctgcagaactggagctgcaaccaatgtcatctttggtcttgctctgggatacaaatcagctattatccctatcttcgccattgccttcagtattttcctcagcttcagccttgccgcgatgtatggtgttgctgtggctgctcttggaatgctcagcacaattgcgaccggtcttgccattgatgcctatggccctatcagtgacaacgctggaggcattgctgaaatggctggcatgagccacagaatacgtgaaagaactgatgctctggatgct

SEQ ID NO: 8238 - DNA, 379 bp, Triticum aestivum
  Clone ID: uC-tsrow189035c03b1
tgtgatacatcctttctctgtctacttcctagtacctggagactactcgctgcaatcttcttctgttataattgacgctacggatgttcttcgtgctcgggcaaaggcagagtccccggatgaacctattctatgccgcggatccccattccatatccatgtagttggtacagagtagcaaacactgtttggtgtagtttagaggcagcgatttcaccatgacatgtgcagctgtgaagatcatgtacaagagcattattcccatgtacacttgtgatttatttgagccacttggaggcttcctttgtaatacacttgtgtttgtgtacagtgtaaaagcatccgccaaggttaatatggtgcactggtgcacttaacc

SEQ ID NO: 8239 - DNA, 342 bp, Triticum aestivum
  Clone ID: uC-tsrow189035c06b1
gcgtccgcccacgcgtccgcccactgaacagttgcagaaccaaatggagcaagattatgatatcggatctaccatcagagacaagattattccacatgctgtttcatggttcactggagaggccgctcaagatgaggactttgacggcatcatggatgatgatgaagatgatgacgaagatgatgaggaggatgaagatgaggatgaggatgacgaggaagatgaagatgatgacgatggtgataagaagaagggtgggcgagttcctgcaggggaaggtcaggcaggggagcggcccgcggagtgcaagcaacagtgaggtccttcccagatgaagactat

SEQ ID NO: 8240 - DNA, 334 bp, Triticum aestivum
  Clone ID: uC-tsrow189035c07b1
tcccacgcgtccgagacagccagccaccacacgccgacgccaaactcgccgaccaatcgaaggctcgggaggagcgacgatggcccgccgctgcggctgccccgtcggcgccgcgctcctcgccctctccctcgccgtcctcctcgccgccccggccgtccccggggccgccgggttccacctcggcggcgacgagagcggcctcgtgcggggcatgctcgccgccgtccgcgagcgggccgaggccgaggacgccgcgcgcttcgccgtcgccgagcacaacaggaagcagggttctgcattggagttacacgagttgtgaatgcaaaaaggc

SEQ ID NO: 8241 - DNA, 219 bp, Triticum aestivum
  Clone ID: uC-tsrow189035c08b1
tccgactccatggacgctcctgacgtgttgcagtccgactctgaagagccttctgaagaggagcctgcctcctcctcctgatagttcagagagaaaatgcctctgtgtatttattccctgatgaatgtgctccagattcagaaatagcattagcaggcaaacaattgttcagatgagacatttgagatgatctgcaggttgcgggtgacacatcactga

SEQ ID NO: 8242 - DNA, 441 bp, Triticum aestivum
  Clone ID: uC-tsrow189035c09b1
tgcggcagcaacagcaatagcagcaatacctgcagctgcagcccaccaccaaccgcgccacgccatttaccaccatataatcatcacccgcccccaggcttgtcgggagcgaagccaagccagtcttgtgttggaagaacgcctcaccatccatcagagcagctcggcttgcagatcgagagtgagggagtgagaggcaatggcgacttcgttccaggggacgaccaccaagtgcaacgcctgcgacagacggtgtacctcgtcgacaagctcaccgccgacaaccgggtctaccacaaggcctgcttcaggtgccaccactgcaagggcaccctcaagctcgcgaattacaactcgttcgaaggagtgctctactgcaggcctcactttgaccagctcttcaagaggaccgggagcctcgacaagagcttcgaaggcact

SEQ ID NO: 8243 - DNA, 392 bp, Triticum aestivum
  unsure (1)..(392): unsure at all n locations
  Clone ID: uC-tsrow189035c10b1
ctgtcggcgcgtcccgacgaggcagccctgtccgccgtccccctcatccgccgggccatcgccgcagagaccgcggtcgccgtggtcagcaccgacggccacctcgtcggcgagatctccaccgcgcacctcgctgcctgcgacgagacggcagccgcggccatcgccacgctctcggcggccgacctcatggcatacatcgactacttcggctcgccgccagagcacatcctgcgcgccatcaagaccgggctcaaggccaagggccttgacgccatgcttgagctgatggaggacgagacngatgacgtcgttctccctctcttcctcgtcgtcagatgacgacaccggccggccgcacctgaggcgcccgtcgtcggggagctttgggc

SEQ ID NO: 8244 - DNA, 490 bp, Triticum aestivum
  Clone ID: uC-tsrow189035c11b1
tatcgtgttccagccaggagctatgcccaaggctgaacatgttgatgtcactgcacattgggcggttgtaaaagaggaagcatccggcaacaacggtgctgattggtttgacccaggcataggcatggggaacctgccgtcccttcggaaggttaaagtcagagtcgactctcataaaatgacggtcggggaggccaagcaagccaaggcagcgctggagaacgcactccgtgcccatcctaaccgtcccctgttttgcgtcgagttcaggtggtccataaaagaaggcgctcatgatgacgacctctgctagtgtggtcgcagcgaagaacgttcgtgcaggccgtcaatgtttactggagacgcgcttttgcaaactatatgcgtagcgcatgctgcaatattgatcaacgctcgttactcactgagcttatttcttggcttcacaaaaaaaatggaaaaattgtatgaaaaaaaaacaaacaaaata

SEQ ID NO: 8245 - DNA, 327 bp, Triticum aestivum
  Clone ID: uC-tsrow189035c12b1
ttacggaatacgggtggcgataaagcgggcgcagtccgggtcgatgcagggcgcgccggagttcaagaacgagatcgagctgctgtcccgggttcaccacaggaacctggtgagcctgatcggcttctgcttccagcaaggggagcagatgctggtttacgagttcgtcgccggtgggacgctgagggagaaccttgttgttagagggacgtacttgggctggaagaagaggctgaggatcgcgctcgggtcggcgagggggctggcgtaccttcatgagctcgccgacccgccgatcatccaccgcgatatcaagtccaccaacat

SEQ ID NO: 8246 - DNA, 319 bp, Triticum aestivum
  Clone ID: uC-tsrow189035d01b1
tgcttaattaccctgacagacattgttaggtcttgtgttagtgaagctagctaggtaagaaaaaccatggcggcttcccgcgccttggctgcactgcttgctgtggtggtattcatggtctgctctccggcgcctcgtgttctcgccactgaccccacccagctccaggacttctgcgttgctgatataatgaaccctgtgattgtgaatgggttcgtgtgcaagaacatgaagatggtaacggcgaacgacttcttcttgcccgggcttaacaagccgggcatgttgaacgctcagggctcggcggtgacaccggtga

SEQ ID NO: 8247 - DNA, 212 bp, Triticum aestivum
  Clone ID: uC-tsrow189035d02b1
ttgattctgtggtgctctagcatagttgcgtggcagaactgagagtagaatgtcactgagtgtgtatggtgtgttatagttggtgaataaaggagcgaacagaagtgaatgtgtgatgtgttaccctgatctgtaatagtatgatgtttcattgttacgtgtgctctcgtggttcaagtagcaggaccggctatgttatgagtttttgacaa

SEQ ID NO: 8248 - DNA, 427 bp, Triticum aestivum
  Clone ID: uC-tsrow189035d03b1
tcttatccagtttccctcaacagtgagaacctgcaacttctgagacaaagatattattatgctacgtggaaagctgatggaacacgatacatgatgcttataatgcgggatggctgtttcttaatagaccgaaacttctgctttagaagagttcagatgcgttttcctattaggaatgttaacgatggtttccacaactttacattgatcgatggagaaatggttgtagacgccataccaggtggtggattgaagcggaggtacttagcgtatgatctaatggcaattaatttctcctccaaagtcaagttgcccttttctgacaggtggaagctacttgaggatgaaataattcgtccacgcatctatgagagaaagcagtttgaaactggtctgaaggcaatccatcatacagatatgacctgga

SEQ ID NO: 8249 - DNA, 226 bp, Triticum aestivum
  Clone ID: uC-tsrow189035d04b1
tacaagggaaaccaatcgagcgagcaaactactcgcagccaccacaaattcgaaacacctcctgcctcttgcctgcctgcaggaaccgagaaaagaaatggaggcggcggtcggcggcagctggacacgcgtccgcacgctcggccgcggcgcgtccggcgccgtggtgtccctcgccgccgacgacctcttgggcgcgctcttcgccgtcaagtcggcgcccgct

SEQ ID NO: 8250 - DNA, 284 bp, Triticum aestivum
  Clone ID: uC-tsrow189035d05b1
tacaaggaccccaacttcaataagattgagagtatgattgcaagggaagcactcattcaatgtgctgaggttctcgatatgtaatctaatggacatacagggccaaatgagtcacatttggcataatgctgagcccatcaacagatagccatgcctgtctcagcctcagtgctgctagattatgacataaaccggagatgacggggagcgcctccgacttccaccaaagcaactgtggccataagtcggcgatgtccacctcccggaggacgaggccagcggca

SEQ ID NO: 8251 - DNA, 376 bp, Triticum aestivum
  Clone ID: uC-tsrow189035d06b1
tcttaggtttcagttctcctccgcctccggtctcgagagctcgccagaatggtcgcccacaggttccaccagtaccaggtggtgggtcgcgcgctgccgacccccggcgatgagcagcccaagatctaccgcatgaagctctgggccaccaatgaggtccgcgccaagtccaagttctggtacttcctgaggaagctcaagaaggtgaagaaggccaacggccagatgctcgccatcaacgagatctttgagaagaaccccaccaccatcaagaactacggcatctggctgaggtaccagagcaggaccggttaccacaacatgtacaaggagtaccgtgacacgaccctcaacggcggggtggagcagatgtaca

SEQ ID NO: 8252 - DNA, 350 bp, Triticum aestivum
  Clone ID: uC-tsrow189035d07b1
tgcccgctcctcctccccgtccgtccccacacacacacgcacgcgtttgacattttccgcccaccaccgccggagggagctccagccatggccgccaagtgctacccgacggtcagcgacgagtacctggccgccgtcgccaaggccaagcgcaagctccgcggcttcatcgccgagaagaactgcgcgccccttatgctccgcctcgcgtggcactcggccgggaccttcgacgtggccaccaagaccggcgggcccttcggcaccatgaagtgccccgcggagctcgcgcacggcgccaacgccggcctcgacatcgccgtcaggctgctcgagcccatcaaggagca

SEQ ID NO: 8253 - DNA, 373 bp, Triticum aestivum
  Clone ID: uC-tsrow189035d08b1
tcggacgcgtgggggccatagccagagagacccagcaaccggagcaagctccacaccggtcaagttcttgcaagagaggaaaaagaaatcgaagaggcagagatgggaagaaggagaagcccggctctgccgctgctgctgatctttggcgtcctcgccgtcgtcctcgcggctcttccctcctccacgcccgcccagcaccaccagcagcagcaccaccagcagcagcagctggatcgcgagcagtaccaccacccgccgtcgcaggagcagcagcagccgccgcatcagcagcacctgcaaatccaggtgcatcagcagcaggaggatgggggcggcggcgggggaaagggagcagcagcagcagcagcag

SEQ ID NO: 8254 - DNA, 350 bp, Triticum aestivum
  Clone ID: uC-tsrow189035d09b1
ttcagtttggtcgccttccgattcgaacctccccgaaatccgcagcagtcgacaggaggccaaaggcgccgccatggcccgtacgaagcagaccgcccgcaagtccaccggcggcaaggcgccccgcaagcagctcgccaccaaggcggcgaggaagtctgcgccgacgaccggcggagtgaagaagccccaccgctacaggcccgggaccgtggcgctccgggagatccgcaagtaccagaagagcacggagctgctgatccgcaagctgcctttccagcgcctggtccgcgagatcgcgcaggacttcaagacggacctcaggttccagagccacgccgtgctggccc

SEQ ID NO: 8255 - DNA, 372 bp, Triticum aestivum
  Clone ID: uC-tsrow189035d10b1
cttggtacttctgctctcactaactgaatacttctccccttcctacctttcgcccccgcgtcgccccgcaggggcggctcgggcggaaccctaaacgccgccaccgccgccccctctccctcaccccctctcgccgccgtcggcgctcgtcggtgggcaaagcccgttggcggccgacgacggcgggatctggcgctcgcgctggtcgggcacgcccctcgcagtggtgggtgttgtggagtttttggctgcgagatctggagctcgagtgacggcgcacggcagagcttcgcagtggggtggaggtgtgcggctggggctcgcaagaggagttggtcgcggcgcggtggtccctcctggagccaacgacac

SEQ ID NO: 8256 - DNA, 378 bp, Triticum aestivum
  Clone ID: uC-tsrow189035d12b1
tcgtacagaagccatcttgctccgttccagctcaggcgagcagcgaccaccttccggcgagggcagtgggcagcagcgatggagggcaaggaggaggacgtgcggctcggggcgaacaagtactcggagcgtcagcccatcggcacggcggcgcaggggtccgaggacaaggactacaaggagcccccgccggcgccgcttttcgagcccggcgagctcaagtcctggtccttctaccgcgccggcatcgccgagttcatggccaccttcctcttcctctacgtcaccatcctcaccgtgatggggtacagcggcgccgcctccaagtgcgccaccgtcggcatccagggcatcgcctggtccttcggcggcatgatc

SEQ ID NO: 8257 - DNA, 350 bp, Triticum aestivum
  Clone ID: uC-tsrow189035e01b1
tcgttcgcgtggggttgtcaatgacaggattcttgtattccgctttacagatgttggcaaactcccaccaccagtgctgcagtttgctgatgtcacatttggttacactccggataatctcatctacaagaaccttgacttcggtgttgaccttgactcgagagttgcactggtcggtcccaatggggctggtaagagcacacttctgaagctcatgacaggtgacctatctccgttggatggcatggtcagacgccacaaccacctacgcattgtacaatttcatcaacatcttactgagaagctggacctggacatgcccgacctgcagtacatgatgagggagtacc

SEQ ID NO: 8258 - DNA, 372 bp, Triticum aestivum
  Clone ID: uC-tsrow189035e02b1
tcgttgatcctgatcctccaggccgtcctggtcatggggatcctctcacacgtgaacgccgactatttccccaagtgctgcaacagttgcaggtccttctcgggggtcgacgtctgcgacgacgcccacccccagtgccccaagggctgctcggcctgccgcgtggtgacgcccagccctcacaagacgttccggtgcgccgacatgaagagcaccgtcgacggcacctgcggcgggccatgcaaaaagcactgatccgttcagggcttcaggctcagacgaggtgtgccgcctaaaataaagctcagatgagatgagcagtcatggtgcctatgcttgtgtgtgggtcgtgctatacggccaacagtatgt

SEQ ID NO: 8259 - DNA, 322 bp, Triticum aestivum
  Clone ID: uC-tsrow189035e03b1
tcctacgcgtccgcccacgcgtccgatcttccccgataccaaagctcatcttcttctccttgaaatctttttgggttcacagatttggaggatgtcttgcaactgtggatccggttgcagctgcggctcagactgcaagtgcgggaagatgtaccctgatctgacggagcagggcagcgccgccgcccaggtcgccgccgtggtcgtcctcggcgtggcgcctgagaacaaggcggggcagttcgaggtggccgccgggcagtccggcgagggctgcagctgcggcgacaactgcaagtgcaacccctgcaactgttaagct

SEQ ID NO: 8260 - DNA, 436 bp, Triticum aestivum
  Clone ID: uC-tsrow189035e04b1
ttcagcattactgagttattcagataacgtgaggggcaatggggtggatcaagcatcccatagtttaacagttgcaactcgtaatactttcggagagcttgatcaaagcgttcgaccagttgcacctcttcacttcttacagatgctgcggaaaaaatacccccaatttgctcaacagcaaaataatgtttacatgcagcacgacgcagaggagtgctggacacagctgatctatacgctttctcaaacacttacatcagaagcaagtgaacctactgctgctcagatgaaggaactcttcgggattgatcttgtgagcagggtacactgtgcaaaaagtggtgaggagagttcagaggcagagtcggtttattctctgaagtgccatatatctcatgatgtaaaccaccttcatgaaggactgaagcatggtttg

SEQ ID NO: 8261 - DNA, 391 bp, Triticum aestivum
  Clone ID: uC-tsrow189035e06b1
tgtggaagagaaggtcttgttgacacagcggtcaaaacagcagaaactggatacatgtcccgtaggttaatgaagggtttggaagatctctcagttttctatgatcagacagtccgcaacgctagtggtggtatagttcaatttgtctatggagatgatggcatggatcctgtaaagatggaaggaaaaggtggcaatcccttgaatctggaccaattgtttatgaaagtcatggccacatgtcctcaaaggggacatgaaacattatctcctgagggaatctcacaaatgttaaatgataagctctccgaacaagacccctcagctggtggttgtagcgataggttcaaggaattgttaacaaaatttgtcgggaatcgcatcaaaatgc

SEQ ID NO: 8262 - DNA, 378 bp, Triticum aestivum
  Clone ID: uC-tsrow189035e08b1
tggtagatctgattcgatcgcgtccgacacggaatccgggtcagacagagggagcagcagatcgaaaaaaaccaggatgtctaagcggctccagggagaggagatacaggcaaactgcgcccgcaaaaggtcacgaccttctgatcagaagcacctctatctggtgctggatgactggaaagatgggttcagcattcacaagattgacgccgacgacgatgacgcggaccttggccagccaccggtcctccggttggtgttgccggcgcctggctttccaatgcgctttgcggtcgtgggcagcaacatcgtcatcgtcaccaacccacgctgtggtcaggctcccacacttttctatgatacgaaaagaacaggact

SEQ ID NO: 8263 - DNA, 386 bp, Triticum aestivum
  Clone ID: uC-tsrow189035e10b1
tctggatggtcatcgtcttgctactggctcttacagtaatttattccgtgtttttggttgtactcctggaaatactgaggcaaccactttagaagcaagcagaaaccctatgaggcgtcaggttgctaatccaacaaggcctacaagaaccctgacctctttgacccgtgctgtgaggagagggggtgaaaatgcaggagccgatggcaatgggaattctaatgacttctcaacaaagttactccatcttgcgtggcacccaactgaggattccattgcgtgtgctgctgggaatagcttgtacatgtattatgcatagggaatgtgctagagaagattcactgtttttggtttgttcaatgtgaaagcttgggcctcgcacatgc

SEQ ID NO: 8264 - DNA, 328 bp, Triticum aestivum
  Clone ID: uC-tsrow189035e11b1
tcccgctcgccgcacctaccctaccgcgagcgtcagagccgcacgagcgccgcggccaaagagagcttgcttgcttggcccgctccgatggcccgcgacggcgcgtcggcggagcggcgccgggtggcgctgcgggtcctgctcgcgcgcggcgagggctcctcgtcgtcctccccgccgccgcgggggcccgaggaggaggcgcggcggggcaagcagcagtggctcgcgctccgcctgcgcgacctcggctgcgcgtccgccgccgcctcccgggcccacgcgcccgtcgccgcctcggcctccgtgcgcccggccccggacgcgt

SEQ ID NO: 8265 - DNA, 215 bp, Triticum aestivum
  Clone ID: uC-tsrow189035e12b1
tttggggaaagcctcctgtggatgagcatggacgccccctctacggagatgtttttggtatcctacagctggatgaacctaattatgatgaggagcctgttgaccgcagcaagcattggggagacttggaggaggaagaggaagaggaggaggaagatgaggaggaagaggaaggaggaactaatggaagatgaagacatggaagctggcatgca

SEQ ID NO: 8266 - DNA, 306 bp, Triticum aestivum
  Clone ID: uC-tsrow189035f01b1
tgaagaaagaagatcgagcgagcgagaaatccccaatccccaccaaaccctaacccaaaccctaaccctgattgaaacgaccaggagaggagaggagaggagcggatccggcgatggccgtcgagaagatgcacttgtccatgccgttgcccgccggcttggagggtttccccttcaccacgttccaggcggagctggaggccttcaccgtcaagttgagggcggaggcgaagaaggccaaggccaagccggaggtcaaggaggccaaggccaaggaggagaaggccaagccggaggtcaaggcca

SEQ ID NO: 8267 - DNA, 400 bp, Triticum aestivum
  Clone ID: uC-tsrow189035f02b1
tcccacgcgtccgcccacgcgtccgcggacgcgtgggggtttgcactacctccatgaggaatgccatattgttcatcttgacttgaaacctcaaaatatattgatggatgctaccatggtaccgaaaattgcggactttggtttatcaaggatctttggtgagaagcaatcccaaatcatcactcaaaattgtcagggaacacgaggatacatggcaccagagtacataatccaaggcatagtctccatcaaggcagatatatacagtttgggtgtcataattatcgagatacttactggctctagatcatatcccctcagagaggacaatagtcgtgagtgtaccgacaagtctatccaacaattcaaagagcaaatacttgaaacttgggggaaaaga

SEQ ID NO: 8268 - DNA, 309 bp, Triticum aestivum
  Clone ID: uC-tsrow189035f03b1
tgtgctccgaaccaacctgttggaatggttggtttgactgacagcatgcctgctgaagttggtacttctgagccgcagcagatgaatagttctgacaatgccatgcaagagccgcagtctgaaaatgttgctgacaagtcagcagatgatggctacaactggcgcaaatatgggcagaagcatgtcaagggaagtgaaaaccctagaagttattacaagtgcacacatcctaattgtgaagtaaaaaagctattggagcgtgcggttgatggtctgataccgaagttgtctataaggggcgccataatc

SEQ ID NO: 8269 - DNA, 382 bp, Triticum aestivum
  Clone ID: uC-tsrow189035f06b1
ttaggggaaaagccgaagttgggggtacaagatgattgaggtctatgtactttgaaagaacggaaacatatcggaataatggaaatggtgaacttctgtacataaataacttgatttttctttgtattactgtcggcgagagctgtcagttttgctccatattcatgtggcaatgtgatttatttttctgggtttgaagcacttctgcagttatgcttctgtaggagttcagcgttgtaatagttcggagtatgtttagatctgtaatagaataacaagaccaaacttcagtaagatagaatggtaatgaactgctagttttgggggctgttggctcaaccgtggtacttattaaaccagggttgatgtataggaacagtat

SEQ ID NO: 8270 - DNA, 326 bp, Triticum aestivum
  Clone ID: uC-tsrow189035f08b1
ttcgaacaaacctccataccaaaagcaaaagagcggagcagctacacagcccccccgatccttttgtaaacacaatggcggcgccggcgatgtttcctaaggcgacgaggaaagcctccgtgggcggccgggcgtggcggctgctgcggctggccgtgctctgggcgcggaaggggagcgcggcgcagagcctccgcctgctcaagacgctgcggcacagccgcgtcggcggcctcggcctcggcggccggcgcaacgaccggctgcactacggcgagcgggagttctccatcgacgagacgccggcgttccggttccgcaccccc

SEQ ID NO: 8271 - DNA, 316 bp, Triticum aestivum
  Clone ID: uC-tsrow189035f09b1
ttcttccaaaacgcacccaccaccacaactccggcggcggcgaccagacgaacacgagcaccaaggcgatggcgactgctctcaaccgcggcctccgctccgggatccgcctgctcgccaccggcgccgaggcctccaagccagcttcacgtggattccatgctaccggtgtgaagaggatgtcagggcatggccatgatgagccatactacctccacgccaagcacatgtacaacttgcacaggatgaagcatcagaagctgactgcatggacttcggtgctgggagctgtaagcattggtgtcggtgtcccggt

SEQ ID NO: 8272 - DNA, 340 bp, Triticum aestivum
  Clone ID: uC-tsrow189035f11b1
tcgctctattaccagcttcggttccacgcgcgcccccggcgctgcgccagcgcccctcctcgccggtgccgcccccggtgaccgctggcccgggccggcagacgccgccttcgacacgtctacccctgccgccgcctggtcctccgcctgccggggcggtccgcctcggcgtctcgtggagccagatcgtccgtgcggaatcggcgggcagcgttcaaggccctggcttttcggtcccttttgagccggtggtgtcgtcggtgctctcgcgcacgctggtggatgatccagtggactgcgtcttcctggagtcaggtctggacttgtgggccctggagga

SEQ ID NO: 8273 - DNA, 399 bp, Triticum aestivum
  Clone ID: uC-tsrow189035f12b1
tttctcgtgctcccggaggccggagcacgcaggagatcgaattcgccgcgccggctcgtcggagacgacagacccccacagagtggtggtgcgtataatgaacaaaggcagcatccacaaaaaggagacgcacggaacaagcgacgacataagcgagaacacgcctgtggagaaggtcaggggccccaatctgtttgaacggaccaaggaagagatcgaggctcttgtggcggctgttcacgataagatggagcaccattccagtccccgcgggaaggagggtgaattgcacaaggattccaaggaacacagcaaggcagacatgcataagaagacccacgagaacgaaactcatggtacaagcaatgatataagtgaggacacgccggtcagcaaagt

SEQ ID NO: 8274 - DNA, 294 bp, Triticum aestivum
  Clone ID: uC-tsrow189035g01b1
ttgttgcgccagagcgagagagctttttcctgaccgtgacatgacaccgcatctgcccgtgtcgccccaccccgcccaccacctgctcgacgcgctgcccccgtagacgcaccaccgccgccttcgcaggcgccggcgattttgcccgccgcgccctagggccttctccttcccctgctccctccgctgccgcgccgccgccgacgccgcgccgcagccggcggctgctgcagcgaggaccagggtgttcgacgtgtcggacctgcacaccgactacccggagaacatggagtg

SEQ ID NO: 8275 - DNA, 366 bp, Triticum aestivum
  unsure (1)..(366): unsure at all n locations
  Clone ID: uC-tsrow189035g02b1
tcgttgtcgtccgcaaggaggccgagaactgcgactgcctgcaaggatttcaagtctgccactctctgggaggaggaactggttctggtatgggtacactgctcatctccaagatcagggaggagtacccagataggatgatgttgacattctcagtcttcccatcaccgaaggtgtctgacactgtggtggagccttacaatgctacactttctgtacaccaacttgtcgagaatgctgatgagtgcatggtgcttgacaatgaggctctctatgacatctgcttccgcactctgaagcttgctacacccacantttggtgatctgaaccatcttatatctgcaaccatgagtggcgtcacttgt

SEQ ID NO: 8276 - DNA, 317 bp, Triticum aestivum
  Clone ID: uC-tsrow189035g03b1
tctgtcgcgtgggctccgctacagccctgactcggagatccaaacccaggattcctgagctcctcatacctacaaattattaggtcgtgcttttcggcttccttctgtctccttagctttccccatttattgcaaccttctcaaatctcaagattccaactggtcaaggaagtgaagaacaaggacagaaggacatggatgccttaagttcaatgctcgacaaggcgaaagacaaggtgaaaagcaaccctgatgtgatggagaaagtcaattcggtcctcgacaaggttaagaaccacccagaagtcatggagaaa

SEQ ID NO: 8277 - DNA, 429 bp, Triticum aestivum
  unsure (1)..(429): unsure at all n locations
  Clone ID: uC-tsrow189035g04b1
tcttcacgcggtcgggcggtggggggcacgctggcctaacctccgaacccggtggggcctctttcccatccgtcctccgctgccgtggctgtaccgcactgccgcgctcgccgttcccacacaccctcactagccactcccattattcccacctgtcccagttgatcttccgatcgcctgcccgttcaccttctctctgcgagcagcccaggccggaggcatgtcggccaagaagatcgtggtgaagctggagctgcatgacaacaaggacaagcagaaggccatgaaggccgtctccgtgctcgtcggcatcgacgccatatccatggacctggcgtcgcgcaagatgacgngtgatcggcacggtggacccggtggccgtggtgagcaagctgcgcaagggttgggcggcctacatcgagtccgtcg

SEQ ID NO: 8278 - DNA, 235 bp, Triticum aestivum
  Clone ID: uC-tsrow189035g05b1
cttcctttggtggttgaatcctatggatggatggatccctgccgtccgtgcgtgtgtgcgcgtgctcgctctttgtttccatatatatggtatcgtcctagcctgtgtaactataagatgaataaaagtctcagaaactaagtactccctccataaagaaatataagagtagtgatctagacgctcttatatttcttcgcggagggaggtattttcctgagaatttatacttctt

SEQ ID NO: 8279 - DNA, 361 bp, Triticum aestivum
  Clone ID: uC-tsrow189035g06b1
ttttatcggcaacaacctgaccaacaccggactggccgcgatcctcgaccactgcccccgcctcgagtccctcgacgtgcgccgctgctgcaacctccagatggatgatgccttgagatccaagtgcgccaggatcgggaacctcaggcttccccgggaccccatcaacgacttcaagtaccgggcttacctcgctatcagtgatgactaccccggcggttccgacatcgaggtcgacatgtacgatgatctgctggacgtggtcaccgacgaggaggatgccgagttcgatgacatggctgattatatcgaccgtgtgggctcggacgctgacatgtatgatgacgtgttcgacgatgtc

SEQ ID NO: 8280 - DNA, 298 bp, Triticum aestivum
  Clone ID: uC-tsrow189035g07b1
ttcgctaatgttcggaacgatgttctgggaccttggaagtaaaactcgaagatcacaggatctattcaatgccatgggatcaatgtatgctgcagtactatacatcggagtgcaaaattctggttctgttcaaccagttgtcgtggtggagcgaacagtcttttaccgggaaagagcagctggcatgtattcagcttttccatatgcatttggacaggttgctatcgaatttccgtacgtattggttcaggctttgatatatggcgggctagtctattccatgattggattcgatgga

SEQ ID NO: 8281 - DNA, 427 bp, Triticum aestivum
  Clone ID: uC-tsrow189035g08b1
ttccacgcgtccggaagtagtactaaaattgatacgaggaaaatagcatcaaaatgcatatacgaatgcataatatcacgtgccttttattgagttaatttacaacattgcacatgttttctgtgtggtgttaactttatagttctgtaatacactagacttgctctggctaagtttctccgaatatatatggtagaatagcctactaatttttttaggtttagcacataaattaaagcacagttactgggtttgtagaattgtaggcctggttaattgtgtggtgcaccactgcaacccaagtgttccctgttcttgttagccattgaacaaacgcatggttcgctgctcagtgtcagggccctgctgaggttaatgtggtgaaagatgtgtaaagctcactagcgggcttgaaccagcttaaacg

SEQ ID NO: 8282 - DNA, 333 bp, Triticum aestivum
  Clone ID: uC-tsrow189035g09b1
tgcagcgctcacccagtaagctaacgaacccgaccaccccccggtagctcggcagccatgaactgcggaaggggtcccgctccggcgacgatggtgcgctgcaggcagtgcagcgccagcgtcgccgcgcctgccggcgcccgtgccgtccagtgcgcgcagtgctgctgcgtgacccgcgtgagcggggctggccgacagctcagtgtgatgcgccccatcccgaactttggcggtggccgcggcaagaagcgcgccgtgctcgtcggtatcaagtacaccaagacgcgtgcctgcgagctgaggggccccatcaacgacgtcaagtgcatg

SEQ ID NO: 8283 - DNA, 303 bp, Triticum aestivum
  Clone ID: uC-tsrow189035g10b1
tttgttggattctgggattcattggggagcagcacctgtagtgaagggcatacgggatgcaactcttgatttactgcacatccttgtagctgtacatgccgaggtatactcgggtgctaggcctttgttggagaaaacgatgaaaattttggtcgagggtttggtcgacatctttgttagtcttttttatgagaacaaggccaaagatctcagaatgttggatgcaaatggtttttgtcagctcatgctagagctcgagtattttgaaaccgtgttaaacacatacttctctactgaggcaca

SEQ ID NO: 8284 - DNA, 404 bp, Triticum aestivum
  Clone ID: uC-tsrow189035g11b1
tcttggacgcgtggcggacgcgtggcggacgcgtgggctttcaggaagagttccagccagcctgggaggaagacctctacacagagttagattcaactttacggacaatgctgggctgcgtggaattcctggtttacatgagtgtggccctcatttatcagtcgctgcaaagatcggcatggctttcggggtacttgtagcttttctgtttctagttgtatttgctgcatgctggtggaaaaggaggcaaaacgttatccgtggtcagaaattagctgcagcaagggaagctccgtatgctaaatcaaggacccagtttacacgggatgtgcagatgggcaagcaccaccgcccgcatgagacgagcccacggggtggcaacaatgaaagctcgccacatttgc

SEQ ID NO: 8285 - DNA, 308 bp, Triticum aestivum
  Clone ID: uC-tsrow189035g12b1
tcttcacgcgtccgctcctctccgtccccatcgcgtgatcgatcgcctccgccttttccgcgagcctcttcttccccgatcatggagcagactttcatcatgatcaagcccgacggcgtccagagaggcctgatcggggatatcatcagccgattcgagaagaaagggtactacttgaaggggatgaagtttatgaatgtggataaatccttcgcgcagcagcactatgccgatctctctgcccagcccttctttgccaagttggtggattacatcatttccggccctgttgtggccatggtgtggga

SEQ ID NO: 8286 - DNA, 220 bp, Triticum aestivum
  Clone ID: uC-tsrow189035h01b1
ttgtaccccgggccgccggcgaccgccgcgagagcgagaccctagccaaggtctccctatcgtcggtctcggccgccgcggcggaggtctcaaccttccccctcgacgccctcaagacgcgcctccagctccgccgcagcaccggtggtggtggtggtagcggcggtggcgtcttacgcgtcgcgggcgagctcgtccgcgacggggggttctaccgggg

SEQ ID NO: 8287 - DNA, 284 bp, Triticum aestivum
  Clone ID: uC-tsrow189035h02b1
ttcttaaacccaaccccgccgccgccactgccgtcgccgccgcagcgcgcggaggcgaccaccccgccttcgccaagatgcagatcttcgtgaagaccctgacgggcaagaccatcacgctggaggtggagtcctcggacaccatcgacaacgtcaaggccaagatccaggacaaggaggggatcccgccggaccagcagcgtctcatcttcgccggcaagcagctcgaggacggtcgcaccctcgccgactacaacatccagaaggagtccaccctccacctg

SEQ ID NO: 8288 - DNA, 313 bp, Triticum aestivum
  Clone ID: uC-tsrow189035h03b1
ttcttatggaccagattgcagtagttggtcaaaattggcctgatcaagccgaacaaaatccgatcttttatgaaattatgtggtggcagagcaggcaggcaggggtggtacctccaaggagaggatatacaggtacacctgagtcattatacaattttggaagaaacaacagagttcatgcacctggaaaaaaaggggccaaggggagctctgctaggggagattcagcaagtgccaccccatggtgcagggcgttggcgatggatgatcattactcctgagggggaatggggctgggcgtggcagcctgctc

SEQ ID NO: 8289 - DNA, 310 bp, Triticum aestivum
  Clone ID: uC-tsrow189035h04b1
tgataggttccatgtgaacggcacttgcacatgggtaagccgatcctaagggacggggtaaccccggcagatagcgcgatcacgcgcatcccccgaaagggaatcgggttaagatttcccgagccgggatgtggcggttgacggcgacgttaggaagtccggagacgccggcgggggcctcgggaagagttatcttttctgcttaacggcctgccaaccctggaaacggttcagccggaggtagggtccagtggccggaagagcaccgcacgtcgcgcggtgtccggtgcgcccccggcggcccatgaaa

SEQ ID NO: 8290 - DNA, 175 bp, Triticum aestivum
  Clone ID: uC-tsrow189035h05b1
ttcacgcgtccgccacgcgtccggaatgaatgcttgtaatattagcaatatcatattttgggctcctataacattgcacgttgctttgaaaatgcatcagaactgggctaggcccaagatagcttgcggtgtgatgtgttgtaatgtcaatggtataataatttttttggattgg

SEQ ID NO: 8291 - DNA, 276 bp, Triticum aestivum
  Clone ID: uC-tsrow189035h06b1
acgcgtccgggcgggtgctgaattgaggttgcgctgaatctggacctgcacgacaacaggcagaagcagaaggcgctcaaggtcgtgttcactctccacggaaagaatgccctgcttgtccttcttctccaggtccgtcctagtcatggacggaggggattgccaggatcttcatcatgtttcagtttgacatttccgatgacaacaactgccgcttgcctcaggcatcgaccacatcgccgtggacatgaaggaccagaagatgacggtggtggg

SEQ ID NO: 8292 - DNA, 224 bp, Triticum aestivum
  Clone ID: uC-tsrow189035h07b1
ttcttcatgagaacctggtgaagctcgtcggctactgctccgactccgacagcaactagctgctggtgtacgagtacatgccccagggcagcctggagaaccacttgttccggcggggcagccagccgccgctgccgttgtccacgcgcgtctccgtcgccgtcgacgtcgcccgcggcctcgccttcctccactcccgcgacgtcatcttccgggacctcaag

SEQ ID NO: 8293 - DNA, 372 bp, Triticum aestivum
  Clone ID: uC-tsrow189035h09b1
ttgttgtcggatccttcatctaattacatttatgacctggctgctattttgattcataagggtagtgctgctaatagtggtcactatgtggcacatataaaggatgaaagcaatggtcactggtgggagtttgatgatgagtgtgtatccagccttggttttcacccttttggtgaaaaaccaggcaagtcatctgataaagcggatcagaaatctgaaggtacttctaccgaaggctctgtggcaaatggtaataacagtagccatcatgatgctgcaccgacttctaatatgggagaagatgttctcttccactgatgcttacatgctaatgtacaaacgttcgagcaaggatgaaaatggtattaaaag

SEQ ID NO: 8294 - DNA, 349 bp, Triticum aestivum
  Clone ID: uC-tsrow189035h10b1
tcttgaagccacggccccttcagctgtgtctgccaacaatgtgaagaaggctgaacctacggttccttcagctaggcctgccaacaatgtgaagaaggctgaagctacaggtccatcacctgtgcctgtcaacaatgcgaagaaggctgaagctacattttcttcaccagggcctgtcaacaatgtgaagaaggctgaagctacagctccttcacccaggcctgtcaacaatgtgaagaaggctgaagctacagttccttcacctgggcctgtcaacaatgtgaagaaggctgaagctacagttgcttaacccggccctgctaacactgtaaagaagactgaatctgtg

SEQ ID NO: 8295 - DNA, 254 bp, Triticum aestivum
  Clone ID: uC-tsrow189035h11b1
ttttgcgtctccatggcggcgctcgcgctcatgaaccaggacaaggtcctcatggagagctggtactacctgaaggacgcggtccttgacggcggcatcccgttcaacaaggcgtacgggatgtcggcgttcgagtaccacgacacggacccgcgcttcaaccgcgtcttcaacgaggggatgaagaaccactccatcatcatcaccaagaagctcctcgaggtctacaagggcttcgagggcctcggcaccat

SEQ ID NO: 8296 - DNA, 73 bp, Triticum aestivum
  Clone ID: uC-tsrow189038a02b1
tgctgtggccggcaagacggcctacgagaagaagagcgtttagggcattgacaaggaaaaggtagccgccgcc

SEQ ID NO: 8297 - DNA, 73 bp, Triticum aestivum
  Clone ID: uC-tsrow189038a03b1
agaggacgggtgcccgaaaccctggcccgatcccgtagaacccctagacgcggaggccctgacgcgggggagt

SEQ ID NO: 8298 - DNA, 146 bp, Triticum aestivum
  Clone ID: uC-tsrow189038a05b1
ccgctgacactgtgcctgcttacttcaatgattcccagaggcaggcaaccaaggatgcaggagtttttgctggaactaatgtgatgcgtatcatcaacgagccaacagcagctgcaattgcctatggtcttgacaagaaggctacc

SEQ ID NO: 8299 - DNA, 213 bp, Triticum aestivum
  Clone ID: uC-tsrow189038a06b1
tggtttcgctatgtggcggtgtgaccgtgctcgtcacgggccacctcacagggaaggacgacgtctgccgcgagttcgcgcagtccttcttcctcgcgccgcaggagaagggttacttcgtgctcaacgacatactacgttatgtcgggcagggtgaggccgacccgacattgccgccacctcagcagcagcagtcggcaccggagttggatg

SEQ ID NO: 8300 - DNA, 336 bp, Triticum aestivum
  Clone ID: uC-tsrow189038a07b1
ttccacgcgtccgcccacgcgtccgcccacgcgtccgcccacgcgtccgccagtttccaaggacacgccgttgacaatttgccaccagtacgagctgagacaaacatgctaaaccttgccttgggattttcagcatgcatctttctttggtgtgtcggcgtcacctagcaccaatgtgtttagaactactcctactggacatcattgtcgaaccaatgttttaaaactactgggcaacattgtcaaggttggaattttcggacaaagtgcgctctggtgatgaaacctagcttgttcatcattaataaagtataataaagtagaggctgcgatctc

SEQ ID NO: 8301 - DNA, 367 bp, Triticum aestivum
  Clone ID: uC-tsrow189038a08b1
ttgtgcagttgacgctcactgtgccgggcttgcgagggtgagcgataccagctagccacagcgcacgtacgacggccatggcgagcagcggcgggctggccggtctggcggtgctgctcaccgccgtgctgtgcctgcagctgccggtccacagccgcgcgcagctgcgcgtggggttctacaacaccacctgccccaacgccgaggccatcgtccggcaggccgtcacggccgccttcgccaccaaccccggcgtcgccgccggcctcatccgcctccacttccacgactgcttcgtcgagggctgtgattcatcggtgctcctgtccgtcaaccccggcggaggcacgacggagcgcgaggcagc

SEQ ID NO: 8302 - DNA, 442 bp, Triticum aestivum
  Clone ID: uC-tsrow189038a09b1
tcccacgcgtccgccacgcgtccgtgaacaaaagaggagagctggttgattttctcctgatatcacccttcaagttcctggttgattttctggtgatgtcacccttcattgtgccctctgatgacattccagttctagacttcttcagcatttggttcctggggatgctattgctgaaattctggactaatttggctcattggacaagggacgcgcctttcctggctcatttcattgatggaagatgggactggaagcttactcgggcaaaggatgatggctttgcagggttgagggcaaagtgggtcttgcaagatatattgatgcctatcaccatgaagctagtgattgttctgtgtgttccttatgtgcttgcgaagggccttttcccaaggtttggctactctgctgcggtgaactcgacggtgtaccatttcgcatg

SEQ ID NO: 8303 - DNA, 362 bp, Triticum aestivum
  Clone ID: uC-tsrow189038a10b1
gttgtccaagtactacgacgggaagtcccagtcgttcgcgtgcatgtccgaggtgaggtgcctggaggatctacccaagaagagcccctacaagaagatcaagtcatgcaggagcaacatcaatctagacggaaaccagagagattgccccgtaactggttctaacaacagcaaaggaatcgccaagcagagctctgcgagttcctgcgcgaatctgatgatggcgcggaccagcagcgccaacatgctctacaggcctacggcgatccctgttaacaagagcgcgtgccaccagtagggctcgcagctgcctggaaatgtccgtccatggctggcctcgcgcctcttctttgttccttgat

SEQ ID NO: 8304 - DNA, 334 bp, Triticum aestivum
  Clone ID: uC-tsrow189038a11b1
ttccacgcgtccggcactcctccgccagctgatcaacgagtcgtggatctgggcatgctcggagctgaaaatcctcttggttgtggcaggcttgtcgctggaaatccaaaagcttgagcatgatgtgttaccccagctcatggttcaggaggccaagctggaagagggcgccctggaagccctcctactcatgaagaactcagcaattacgctcttagatctgaggaagtgctttcagttatccttgggcgtattgcttgccgaggaggatctggtcttagcccgagtcaaagagctgagcataatgctaaaggatactgctgatgatgtactc

SEQ ID NO: 8305 - DNA, 86 bp, Triticum aestivum
  Clone ID: uC-tsrow189038a12b1
tttgttgtcgctatgtggcggtgtgaccgtgctcgtcacgggccacctcacagggaaggacgacgtctgccgcgagttcgcgcagt

SEQ ID NO: 8306 - DNA, 415 bp, Triticum aestivum
  Clone ID: uC-tsrow189038b02b1
tggacgcgtgggcggacgcgtgggaaaatgttctggcacttcgaggagatcctccacatggccaggacaaatttgttcaagttgctggtggattttcttgtgctctagatctggtggagcacattaaagccaagtatggtgattactttggcataactgtcgctggctatccagaggcacaccctgaggtaatactaggcgaggaaggtgctacggaggaagcatatagcaaagatcttgcttacttgaagagaaaggttgatgctggtgctgacgttatagtcacccagcttttctatgataccgatatctttctcaagtttgtgaacgactgccgtcagattggtataacctgccctatcgttcctggcataatgccaataaataactacaaaggatttgtgcgcatgactgg

SEQ ID NO: 8307 - DNA, 465 bp, Triticum aestivum
  Clone ID: uC-tsrow189038b03b1
tgctctcggagttgccttcgatttgcagctaaggcctgctttctttctcccttcccgttcttacgtttcagtccctgtagcttcttttttccttacagtctactccccgttccgttgcaaaaagcccctgagctctgtcacattctagcctcgactccttggtcttgggaggagttcgtcgcagatccgatctagagagcctccccgcaccacccatgtttaccttccccttcctctgacggccgccgtcccccgatgaagctgcgcgtccgctgccgctcccactccttctccgtcgccttcctctactggttctacgacttctcatgaactcctcgcccctcgacaacgccgcatccatcctgcctctagttgattagatccagctccgtttcttcccctttcctgtctttcttcttcccgccatcaaagaaaagagatctttttcctggttcttggatcgag

SEQ ID NO: 8308 - DNA, 358 bp, Triticum aestivum
  Clone ID: uC-tsrow189038b04b1
ttttatgacttgcgcttaaacaccaactattctggaggttatcatccggaccatgagattatcgatatgttgtgggaggttctaaagagcttcagttcagataatcagaaaaagtttctcaagtttgtgactggatgttctcgcgggccactccttggatttgagtaccttgatcctaaattctgcattcagagagctggtgtccccggcttggaggaacatggagaccgtttgcccacctcggctacttgcatgaaccttcttaagctccctccttacagaaccaaggagcagttgcaaaccaaactgttgtatgcaataaactctgaagccggtttcgatctgagctaattgcatt

SEQ ID NO: 8309 - DNA, 276 bp, Triticum aestivum
  Clone ID: uC-tsrow189038b05b1
agcaccggagccggcctcccacacactgttcaacgacaagagcagctaccgcgagctctctgagatcgctgagcaagcaaagagaagagctgagattgcaaggttgagggagctcaacacactcaagggccacgttgaatccgtggtgaagctcaagggccttgacatcgacaccatcaaccagaactacaccgtgtgaggaaattggacattgaaccaacaaacatgacattcgtgttggagctagattggaatggagctccgctttaagatttt

SEQ ID NO: 8310 - DNA, 393 bp, Triticum aestivum
  Clone ID: uC-tsrow189038b07b1
tcttccacgcgtccgttccttaaatctgaatatttggggctccttaaatctgaatatttagggatgccggctctcatggaacatttctgtgaatcttgttagtgataacatgatctcctaggagcacattgtgatctgcacttgctcttgcaaaatagtttctatcaaataatctgctcagttgtttctaacttttagttgtatggaatttctgtgtgcctgaacatcattcttgaaagtaacaggggaacttactttcttctggtattctattgttccatcctgcttatgtatcttctactcgtgtcaacaggcaagatttccgacgccgtagaagtggctgggaaggatgtgctatcaacatcgtcgacggtgacgaccggtcttgtatct

SEQ ID NO: 8311 - DNA, 347 bp, Triticum aestivum
  Clone ID: uC-tsrow189038b08b1
ttttggatcgatcgagtcggcgagagcgatggcggcgctccggcacgcggcgaggcgtgcgctccagcagggaggagcgcaggtgaggccttcggtcgtggcggagggacctcggcggctcttgctaaacggcgcttcccctgcccgccggcccatgtccacctcctccatcagtcgcaagccgacatctagtgccaagcctcacggcgagctggaattgctggaaatgcgattcaagaagacgaaggaagagttgtttgatttgctcgtagcagtgagaagggcagaactttacccacagttgttctgggaagacatccaaactcatcggctcatcactcaccttg

SEQ ID NO: 8312 - DNA, 401 bp, Triticum aestivum
  Clone ID: uC-tsrow189038b10b1
ttgatttgctaattccgtatgtgttggttcctatttttgcaggtcaacgacagtacctatcgcgcgatgggtttgggactgagattgccgttcttcctactcctcttgctgctggtcagcctgggagccgcacaaggccggagcacaggtatatctcacacaacagccctttccaatcccatgatgctagttatgttgtttattcatctctaaatcgacatcagtggctcccacatgtaaatcgggaagcacccttaagaacatgtaaatcgggaagcacccttaagattttttctgcgcacagctgatggagggtggtgagctatttaggttggtgttggaattagaactggaattaaggatacccttgttgtgaaatcatcttatgcgagttcccagta

SEQ ID NO: 8313 - DNA, 331 bp, Triticum aestivum
  Clone ID: uC-tsrow189038b11b1
agcggcggccgggtatgatccatggaggacaagaaggttgggctgaagctggacgtgcacgacgacaggcacaagcagaaggctatgcacgtcgtctcgggtctccacggtatcgaccagatcgccgtggacacgaaggaccagaagatgactgtcattggcaccgtcgaccccgtcgtcctcgtcgaaaggctgcgcagcaagttccccatggcacagatgatctccgtcggcccggccaaggaggagaagacggacggcgccaagaaggaaggcgagaagaatgaaggcgacaaggaggagggcgacaagaaggagcaagtggtgtacc

SEQ ID NO: 8314 - DNA, 346 bp, Triticum aestivum
  Clone ID: uC-tsrow189038c01b1
tttctgatccagctggcgctcatgtaatcagccacgcgtatccccacacatacgggcagccactggctcatttcctcaggaaggctgctaatgttcctgatgctaaagtcatatcagagcaccctgccgtcagggttggtattgtattctgtggaaggcagaccccaggaggccacaatgtcatatggggactccatgaggccatcaaagctcacaacgtgaacagcaaacttattggtttcctcggaggaaccgatggtcttcttgcacaaaaaactttggagatcacaaatgaagttctttcttcctacaaaaaccaaggtggttatgatatgcttggtcggac

SEQ ID NO: 8315 - DNA, 345 bp, Triticum aestivum
  Clone ID: uC-tsrow189038c02b1
aaagctgcactggaagaagcatgcccacacacaatctcttgtgctgatactattgccctagctgccagaggttcaacagtattgagtggtggaccatactgggaactctcgctgggaaggagggattcaaagacagcatatatgaagctagcaaataagaacctgcctccacccaatgcaacactgcatcgtcttgtaaaattcttcggaaggcaaggactggataaaagggaccttgtagcactatcaggtagccacaccattggaatggccagatgtgttagtttcaaacaacggctctacaatcagcatagagataacaaaccggacatgacactggagaaa

SEQ ID NO: 8316 - DNA, 411 bp, Triticum aestivum
  Clone ID: uC-tsrow189038c03b1
tctcacgcgtccgagcacgagcgccacatgctttaagctaaccccgtgctgtattatcggtagatgagatggaccgcttccagatgaaggagacggtggaggctgctctctcgcagcttgattccatggggagcccgccgcttagttcgatgagctattagggatcactgctacggtcactagtggctggtcgcctattttcacctcacctagtttctcttttgcaaggccaatattatatactccctccattcagatttactcgtcgtggttttagtttaaatttgaactaaaaccacgacgagtaaatcggaacggagggagtatatcttatgtaatgtatgccagaattttgcaccttttttttgcaacacccatttatatgtgtggatcgaggtgactgcttttttt

SEQ ID NO: 8317 - DNA, 410 bp, Triticum aestivum
  Clone ID: uC-tsrow189038c05b1
tttctgattcaagcaactggagctgatatagtaaaaattgcgaccactgctactgaaattgttgatgtttcaagaatgtttgaaatacttgtacactgccaagaaaagcaggtgccgatcataggactggtgatgaacgacagaggatttatttctcgtgttctctgccccaaattcggtggataccttacttttggctctcttgaaaaaggaaaagaatctgcaccttcacagccaaccgctgcagacttgatcaatgtgtacaacattagacagataggcccagataccaaggtgtttggtattattggaaatcctgttggacacagtaaaagcccggttttgcataatgaagctttcagatcagtgggtttgaatgctgtgtatgtgccatttttggtggatgactt

SEQ ID NO: 8318 - DNA, 348 bp, Triticum aestivum
  Clone ID: uC-tsrow189038c06b1
ttttaccatcagttatggctattaagattgctggctgcttcttggctgtcattttgatatgggaagttcctggggtattcgaaattttgtgggccccctttacgttcctgcttggctataaagatccagagccttctaagtcacacttacccttattgcatgagtggcatttccgatctgggcttgatcggtacatatggattgttggaatgatctatgcttactttcaccctaatgtggaaagatggatggagaagctggaagaatctgagactaaggttaggttgtcgatcaagggtaccattgtgactctatcagtcctggctggctatctgtggtatgaatata

SEQ ID NO: 8319 - DNA, 450 bp, Triticum aestivum
  Clone ID: uC-tsrow189038c08b1
ttttcacgcgtccggatccagttgaagatggtgatactgtgcttcacctggcatgcttatatggacatctaccttgcgtgcagctactgctggaacgtggagcaaacttagagtgcaaagatgaagaaggggcaattcctctccatgatgcttgtgctggaggcttcactgagatagttcagtacattctcagttttgctgcaaatgctgagggttgtgcaacgcgaatgctcaacaccgttgatgctgaaggcgatactccactccaccatgctgccagaggggaacacatggacaccgtcaagcttctgctcgaagctggcgcatgtcccaagaaggagaatgcctacgggcaggcagccgccgagatggccgatcaagataccgaagtccgggccctgttaaccgccaagcaagtcgaggccagcatacatatggcggactgatgat

SEQ ID NO: 8320 - DNA, 446 bp, Triticum aestivum
  Clone ID: uC-tsrow189038c09b1
tctgttggacttccacgtgattggccataagtgcagccattgcaactcatacaacactcgatcgacgtcgcggcctgcagatttatcaggaagcagttctccgttgacaacagactcatcttaagacaacctcctgtagagaatacatcatactggtgtatcacctggtctgtgcagccaatgccagaaccatacacatagaagaagaagcattgtttcgcggcattgcccgtgtagtgtcagccccatccctgggccttcgccgctttaccattctgccaagattcaattcatctcttgaattgtcagctattagtgtattgctgcgaaaagcgttgcttacctgtaagtctgtcttaaatctgtaatacagcaccattactctgtatcaccatggatgaagcccagcatatgctatattccccaggagttgaattctgagctac

SEQ ID NO: 8321 - DNA, 403 bp, Triticum aestivum
  Clone ID: uC-tsrow189038c10b1
ctgagcgccgccacgagtccttcaacaagctgcgcatcttccaggtgctcagcgtcgccttcctcgcgggcctcctctggtggcgcacgcccgcggcgcacctgcaggaccgcacggcgctcatcttcttcttctccgtcttctggggcttcttcccgctctacaacgccgtcttcgtcttccccctcgagcgccccatgctgctcaaggagcgctcctcggggatgtaccgcctctcctcctacttcgccgcccgcaccgccgccgacctccccatggagctcggcctgcccaccgccttcgtcctcatcctctactggatgggcggcctcgacccacgcccggcctccttcctcctctccctcctcgtcgtcctctacagcgtgctcgtcgcccagagcct

SEQ ID NO: 8322 - DNA, 338 bp, Triticum aestivum
  Clone ID: uC-tsrow189038c11b1
tgtgttagtgaagcagctgcggaagtttctcacggcgacaagcacctgtgtgcgtgcgtgcgtgcgtgatggctggggaggaagccaagaaggcggcgccggctgctgcggcgccggaggcagtcgcggagaaggatgtgccggtggtcatcccgcctcctccgggggtcaagccaccggccgacgacgccaaggccctcgtcgtcgtcgacagcactgccgagaaacctcaccctgagaagaacatccacaggggctcacatgaaagagacgtcgctcttgcaaaggtggagacggagaagatgagctctttgatcaaagcatgggtagagaacgag

SEQ ID NO: 8323 - DNA, 341 bp, Triticum aestivum
  Clone ID: uC-tsrow189038d02b1
tctgatggtttcaacgtgtcatcattcacagcaggggcaaggacattcaattttgatgagaacccttgcgattacttccagggtggcaaaataaaagcaacaaccctctccctgtctgtcttggtgtccattgagatgttcaactcactgaatgccctgtctgaggatggcagccttctgagcatgcctccattggttaacccctggcttcttctggcaatgtcggtgtcatttgggcttcattttttgatcctctacgtgcctttccttacccaaatcttcgggattgtgcccctcagtttcaacgaatggcttttggtcgtagcagttgcattcccagt

SEQ ID NO: 8324 - DNA, 394 bp, Triticum aestivum
  Clone ID: uC-tsrow189038d03b1
tttgagactctgaccttgaggagctgaggtgtttatggatttctagctagcagcacgtagggacgagcgtcgtcattggtcgtacgcactagccatgaacggcaagagcaagaagagcaagggcacgccattgctgggcaagtacgagctcgggcgactgctcggccgcggcacgttcgccaaggtgtacttcgcgcacccggtcactggcggtgagccagtggcagtgaaggtgatcgacaaggcggaggtgatgggcatggagggcatggcgcctcgcgtgctccgggaggtggtggccatgcgccggcttcgccacccgggcgtgctccgcctccacgaggtgctcgccacgcgctccaggatctatctcgtcatggagctagccccccgt

SEQ ID NO: 8325 - DNA, 343 bp, Triticum aestivum
  Clone ID: uC-tsrow189038d04b1
ttctcatcgccatggccgccgccgccgccgccgccgcgaggtcgcgcgccgccaccgccgccgcgtgggctcgcctgctctcccaccgccgcgtcgccgccgcagccgcgtccggatcgctgccccacctggcaggcccgcggatcgcgccccagcgccgccacttcgccttctcctccgcctcccccggcgccggcggcggggcgagggacagtgagccgctgttcaccgagcagaccgtctacgacctgctggcccagctggagcgggagcggcagaaggaacgcgaggatcggcgcaaggccggggccggcggcggcggcgaggggaagggggacgagga

SEQ ID NO: 8326 - DNA, 221 bp, Triticum aestivum
  Clone ID: uC-tsrow189038d05b1
tttgtctcattccgtcgtctccatgctctaggacaacgagcacgcggagcccacgtctccacccccaccgccggccgcatctcagagaatttcgaggatgtcgactccttcaaggaagaggctgatgagggacttcaagcggctgatgcaggaccctcctgcgggcataagcggggcgccgcaagacaacaacataatgctgtggaatgctgtgatttttg

SEQ ID NO: 8327 - DNA, 442 bp, Triticum aestivum
  Clone ID: uC-tsrow189038d06b1
ttctttggacaaggcattcaaatgggcagagaagtacaatctaggcgtcatcattgacctacatgcagctcctgggtcgcaaaatccctttgagcacagctcctccaaggatggctcacaggactggggcaccaccgacactaacatcgcacaaactgtgcaagtggtagatttcctcgcatccaggtacgccaaaagcccaagcctcctcgcagttgagctaatgaacgagccgttggcgcccggcgtatccctggagagcctaaaaacgtactaccgcgacgggtacaatgccgtcaggaagcactcatcggatgcctacgtgatcatgtccaaccggctgtcatccccggacccaacagagttcctcgggctcgctggcgggttacccggatctgtcattgatgtgcattactacgcgttgttcaacaacatgtttgat

SEQ ID NO: 8328 - DNA, 336 bp, Triticum aestivum
  Clone ID: uC-tsrow189038d07b1
ttgtgaagagacagaaaagaagaacagaaaaaacagtgggaaaaagaggctgggctcctcgaatctctcaccatctatctcccgtggcttccttgtctgcctgcccacgacttgcctacgccttgccttcggggttggtgagcgagcgagctcgggatcagttggcgactacacacccagaggttgttgtccgagaattatttaggcccgcccccttcttccttccacgccgcctcgcctcccttctctgctccgtctcctcggatctccgcctcaaatttgcctccccaatccccagttccaggttcttggaggaggggggaagccatgggcagc

SEQ ID NO: 8329 - DNA, 345 bp, Triticum aestivum
  unsure (1)..(345): unsure at all n locations
  Clone ID: uC-tsrow189038d09b1
ctcntaaccccccacgtcaaaaaaatcgatttcgccgtcctcctcgcctcgcccccgccccctccccccagatccggcaccgccaccgcccgcgccccgatccccgccccctcgtctgccggtcgggggatcagcaccagcgccgatcgaggggtaggaggaggaggaggaggacgaggaggaggcgggtgcgcgcgacatggctgcgccgccggcgagggcccgggccgactacgactacctcatcaagctcctgctcatcggggacagcggtgttggcaagagtcgccttcttctgcggttctctgatggctccttcactacgagctttattaccacgatcgg

SEQ ID NO: 8330 - DNA, 447 bp, Triticum aestivum
  Clone ID: uC-tsrow189038d10b1
tgagaaactggaagcgctgatcgctgctgtgaacagcagtgatagcagccacatcgtccatgtccctccgggtgaccatgccctttctgatgttcttataagcactcctatctttactggcgaagaaggtggaagtggctttgctgcttctgcagcagctgctgcagccaccggagctactggatatgattttggcgtggacccaaatgtggacccagagttggcacttgccctacggttgtctatggaggaagagcgagctaggcaagaggctatcgcgaaaaaggctgcagaagacaacaaggatcagccctcaagctctaccgatgctattatggctgaagcggaacttaccttaaatgctcctgctgatgttgacgcagatctactcaaggatgatgatgatgctcagctactacagcaagcacttgctatgtcaatggatga

SEQ ID NO: 8331 - DNA, 459 bp, Triticum aestivum
  unsure (1)..(459): unsure at all n locations
  Clone ID: uC-tsrow189038d11b1
ttgcccacgcgtccgcccacgcgtccgccatcccccccttccttccttccttcctccacccacctcccccctctcctctccggcgcgcctccccccaccggcgaatccgcaaccgaatcgaatcccaggatccgcgtcggcgggcggcggcggaggcacatggcgcaccgggtggacaacgagtacgactacctcttcaagatcgtgctcatcggcgactccggcgtcggcaagtccaacatcctctcccgcttcacccgcaacgagttctgcctcgagtccaagtccaccatcggcgtcgagttcgccacccgcaccctccaggtagaaggcaagacaattaaggctcagatatgggatactgctggccaagagaggtaccgtgcaatcacaagtgcttactacaggggagctgtgggagctctnttggtgatgacataacaaagaagctatcattcg

SEQ ID NO: 8332 - DNA, 385 bp, Triticum aestivum
  Clone ID: uC-tsrow189038d12b1
tgcgcacccctctcgctctccgctccatctggtccgattcgattcgattcgatctcggcttcctctccaagccacgcgagaccagccatggcggcgacgatccagtccgtgaaggcccgccagatcttcgacagccgcggcaaccccaccgtcgaggttgatgtgtgctgctcagatggaaccttcgccagggccgccgttcccagcggtgcatcaactggtgtctatgaagctttggagctgagggacggtggatctgactacttgggcaagggtgtttccaaggctgttaacaatgtgaactccattattgcacccgctttggtcggcaaggaccctaccgctcaaactgagctcgacaactttatggttcagcagcttgatg

SEQ ID NO: 8333 - DNA, 391 bp, Triticum aestivum
  Clone ID: uC-tsrow189038e01b1
tttatactctagccgatcagttgcatagcaagcaatggggtgctctaaaaccctagtagctggtctcttggccatgctcttcctagctccgaccatcctagccaccgaccctgatcctctccaggacttctgcgtcgccgacctcgacggcaaggcaatctcggtgaacgggcacacatgcaagcccatgtcggaggccggcgacgacttcctcttctcatccaagctggccaaggctggcaacacgtccactcctaacggctcggccgtgacggagctcgatgtggcagagtggcccggcacaaacacgctgggcgtgtccatgaaccgcgtggactttgcgcccggaggcaccaacccgtcacacattcacccgcgtgccaccgagatc

SEQ ID NO: 8334 - DNA, 409 bp, Triticum aestivum
  Clone ID: uC-tsrow189038e02b1
ttcttacgcgtccgatcgccgccgcaggctttgaccccatcgcccctccgtcctcttcgtctccggtaggccaggtagttaacagctccagcagccatgggaaaggagaagatccacatcagcattgtggtcattggccatgtcgactctggcaagtcaaccacgactggccacctcatctacaagcttggaggcattgacaagcgtgtgattgagaggtttgagaaggaagccgctgagatgaacaagaggtctttcaagtatgcctgggtgcttgacaagctcaaggctgagcgtgagaggggtatcaccattgatattgctctgtggaaattcgagaccaccaagtactcctgcactgtcattgatgctcctggtcaccgtgatttcatcaagaacatgatcaccg

SEQ ID NO: 8335 - DNA, 374 bp, Triticum aestivum
  Clone ID: uC-tsrow189038e03b1
tcttctcgcgtccggatcaaatcacatagaagtgcatagaggtcgtggcgtttgcccaatttcattcccaccatgagcaagccatgcgacggtgccaatcccaagacggagtggcctgagctggtcgggcgcacgatcaaggaggcggaggagaagatcaaggcggaccgaccggacctcaaagttgtcattgtcccggtaggaagtgttgtgacacaggaggtcgatctgaaccgcgtccgcgtctgggtcgacacagtggcggaggttcccaagattggctaagctagcttgtaattagccaactggaataaaagcccatgcaagtctcaacatcgtccagttaatttgccgaacaaataagcatgggtatg

SEQ ID NO: 8336 - DNA, 291 bp, Triticum aestivum
  Clone ID: uC-tsrow189038e04b1
ttggttatggcagtttcctgttcaaaggttcctaaaattaccataattgtccgtggaagtttcggtgctgggaattatggaatgtgtggacgtgcatacagcccgaattttttgttcatgtggccaactggtaggatatctgttatgggtggcattcaggcagctggtgttctcgcccaaatagagaagaacaacaggaaaaggcaaggagtggagtggaccaaggatgacgaacaagccttcaaagccaaagtcgtcgtggcttatgacaaagaaggaagcccgtactac

SEQ ID NO: 8337 - DNA, 407 bp, Triticum aestivum
  Clone ID: uC-tsrow189038e05b1
ttgttacctttctatacaaactcatggccagagtgcttttgccaggagaaccctaggaatcatgcagacaaatgcccaccagacaatatatacgaggttctggagaatcaatttcggagtgaagagaatgaagaaagtatagaagtgaaagccactagtcagactgtttcaatcagccaaaccgaagagactgtgatttaactgaggaaccaaactgttattgtcttaagaggacgagactggatcatttatgcccgtagcagattattgctttttcgaatggattgactatagagggtacggtcgggcctaataaactgggatggaggtagtatttcatcacaaaaaaatcacaaaaaattacacatgtagtgtacatccatatgtgcatttagtttttttggaac

SEQ ID NO: 8338 - DNA, 276 bp, Triticum aestivum
  Clone ID: uC-tsrow189038e07b1
ttccagatccagccggcgctcccctcccctccctccacctccggcctccgaccaagctgcccgcggccaatccctaagccgcgatgagctggtggtgggcgggcgcggtgggcgcggtcaagaagcggcaggacgagcgggcggcggcggccgagcccaccttccagagcgtggcgctcatcctcggctccacggggatcgtcggcacctccctcctcgacatcctcccgcgggacgacaccccgggcgggccctggaaggtgtccgccgtctccc

SEQ ID NO: 8339 - DNA, 453 bp, Triticum aestivum
  Clone ID: uC-tsrow189038e08b1
tcccacgcgtacgcccacgcgtccgcggacgcgtgggcagcacacaactctctccacccccagcagtccatccacccccacccccctttcccctcccctcccgagctcggccatggcaaacgcttcgtcaggagctgggatccatgatgactgcaagctgaggttcgtggagctcaagtccaagaggatgcaccgcttcataacctacaggctggagaaccagaaggaggtcattgtggaccaaactggggagcgcgaggccacctatgaggacttcaccaagaccctgcctgagaacgactgccgattcgcagtgtttgacttcgacttcaccaccccggaggatgtgccaaagagcaggatcttctatatcttctggtctcctgacaccgcaaaggtgaggagcaagatgacgtacgcgagcaccaacgagatgttcaagaggaccctgga

SEQ ID NO: 8340 - DNA, 447 bp, Triticum aestivum
  Clone ID: uC-tsrow189038e09b1
tttccacgcgtccgcgccgagttcgtcgccacgctcctcttcctctacatcaccgtggccaccgtcatcggctacaagcaccagtccgaccccaccgtaaacaccaccgacgcggcctgcagcggcgtcggcatcctcgggatcgcctgggccttcggcggcatgatcttcgtcctcgtctactgcaccgccggcgtctcaggtggacacatcaacccggcggtgacgttcgggctgttcctggcgaggaaggtgtcgctcatccgggcgctgctctacatcattgcgcagtgcctcggcgccatctgcggcgtcgggcttgtcaagggcttccagagctcctactacgtgcggtacggcggtggcgccaacgagctcagcgcaggctactccaagggcaccgggctcgcggccgagatcatcggcaccttcgtgctcgtctacacc

SEQ ID NO: 8341 - DNA, 410 bp, Triticum aestivum
  unsure (1)..(410): unsure at all n locations
  Clone ID: uC-tsrow189038e11b1
tttgcaccatcccgactttaaccttctagtcgccgctccgccatcgccatgtcgtcctcctccgtcgccgtcgccgcgccggtggagcacatggtgctcatcaagctccgcccggaggccgtcacctcgggggccgccgccgcgatggtctccgcgctgcaggccctgcccacgctcgtcccgggggtgtcctacctccacgcgggccccgtgctccgcctccgctcgccggccgccgacgcgctgggccccacccacctcctccactcccgctacgccaccaaggccgacctcgccgcctacgccgcccacccggctcacgtggccgccgtgcaggcgcacatcgtccccaacgcgctcgacaccaccgncgtcgactgggtcaacgccgccgagtccccgtcacccgt

SEQ ID NO: 8342 - DNA, 338 bp, Triticum aestivum
  Clone ID: uC-tsrow189038e12b1
tctcggacgcgtgggtcccgctctccctagggcttcctccctcctctcctcggcggcgcggcggcgaagtccaaccaggccccaccggagctccgaccatgggcggcgagaaggagaacctcgacctctccgacctcaacagctccctccccgccgccgccgccgccctcagcgccgaggaccgcgtcggtctcgtcaatgccctgaaggataagctgcagagcttggcggggcagcacgcggacgtgctcgagtcgctctcgcccaatgtcaggacgcgtgttgagtttctgaggggcattcagagccaacatgatgagattgaggcgaagtttttt

SEQ ID NO: 8343 - DNA, 422 bp, Triticum aestivum
  Clone ID: uC-tsrow189038f02b1
tttctacgcgtccgcgctcggctgctcggcaaggggctcgtgctcaccgactgcgacgactggaagcgccaccgcaaggtcgtccaccccgccttcaacatggacaagctcaagatgatgacggtgaccatgtccgactgtgccgggtcaatgatgtcggagtggaaggccaagatggacaaggggggcagcgtggagattgatcttagccaccagtttgaggagctcaccgcggatgtcatctctcacacggcattcggtagcagctacgaacaggggaaaaaggtattcctcgcgcagagggagctccagtttcttgccttctccaccgtattcaacgtgcaaattccagcattcaagtaccttccaaccgaaaagaacctcaagatatggaagcttgacaaggaggtgaggaccatgct

SEQ ID NO: 8344 - DNA, 394 bp, Triticum aestivum
  Clone ID: uC-tsrow189038f03b1
tttttcggcttccagatcgccatcgagaacatccactccgagatgtactccctgctcatcgagacctacatccgcgacgacgtcgagaaggaccgcctcttccgcgccatcgacaccatacccgccgtgcgccgcaaggccgactgggccctgcgctggatcgacggtggggagcgcttcgccgagcgcatcgtcgccttcgcctgcgtggagggcatcttcttctcgggctccttctgcgccatcttctggctcaagaagcgcgggctcatgccgggcctcaccttctccaacgagctcatctcccgcgacgagggcctgcactgcgacttcgcctgccttctctacgacatcctgcgcggcaagctggacgagtcacgcgtcttcgagatcg

SEQ ID NO: 8345 - DNA, 478 bp, Triticum aestivum
  Clone ID: uC-tsrow189038f04b1
ttgttcccgctttccttggtaacggcttggccccgaccccgcgttgatcaagcacaaaccagcggcagcactagcaccaccaccaccgccggcccccgtacgtctcccgatcggatcggccgtcgtccccgccggcgagcgagcgagcgagcgatcaagatggtgctctcccacgccgcgtcggctggatcctccgatgactccgtgcactccaccttcgcctcccgctacgtccgcgcctccctgcccaggttccggatgccggagaactcgatcccgaaggaggcggcgtaccagatcatcaacgacgagctgatgctggacgggaacccgcggctgaacctggcgtccttcgtcaccacgtggatggagcccgagtgcaacaagctcatgatggactccatcaacaagaactacgtcgacatggacgagtaccccgtaaccacagagctccagaaccgatgtgtgaacatgatcg

SEQ ID NO: 8346 - DNA, 286 bp, Triticum aestivum
  Clone ID: uC-tsrow189038f06b1
tgttggcttctgctccccttccggttcgggttctggttcggttctggtccgagagtagctagcctagtctagggtttccgtagagaggaagggagagggagatccatccatggcggagacggagtaccgctgcttcgtgggcggcctcgcctgggccaccgacgacaacaacctccagcaggccttcagccagtacggcgagatcctcgacgccaagatcatcaacgaccgcgagacggggaggtcccgcgggttcggcttcgtcacgttcggcagcgaggagtcg

SEQ ID NO: 8347 - DNA, 394 bp, Triticum aestivum
  Clone ID: uC-tsrow189038f07b1
ttacacacaccgcacgcatttgacattttccgcccaccaccaccggagggagcgagctccagccatggccgccaagtgctacccgacggtcagcgacgagtacctggcggcggtcgccaaggccaagcgcaagctccgcggcttcatcgccgagaagaactgcgcgcccctcatgctccgcctcgcgtggcactcggccgggaccttcgacgtggccaccaagaccggcggccccttcggcaccatgaagtgccccgcggagctcgcgcacggcgccaacgccggcctcgacatcgccgtcaggctgctcgagcccatcaaggagcagttccccatcctctcctacgccgacttctaccagctcgctggagtcgtcgccgtcgaggtgaccggc

SEQ ID NO: 8348 - DNA, 179 bp, Triticum aestivum
  Clone ID: uC-tsrow189038f08b1
gtcgcccacgcgtccggccaccgcggcccaggccccggcggccaccccgctgcccgcgcccgtggccccggtgtccccgcctccgatgatgccgccgccgaccccggcgccggtgtcccccccgccggccgtggcccctgccacccctaccccggtgccggcgcccggcgcacccgttc

SEQ ID NO: 8349 - DNA, 420 bp, Triticum aestivum
  Clone ID: uC-tsrow189038f09b1
ggcctctctcttctgcccgacctctcgtggccgccgcgaagaaaaggagcttatcatggcttcaaaacgtatcctgaaggaactgaaggacttgcagaaagatcctccgacatcatgcagtgcaggtccttctggtgaggatatgttccattggcaggcaaccattatgggtcctgctgatagtccctatgctggaggtgttttcttagtgaatatccatttccccccggactaccccttcaagccgccgaaggtatcgttcaagacaaaggtcttccatccgaacatcaatagcaatggaagcatatgccttgacattctgaaggagcaatggagtcctgctttgacaatctctaaggttctgctttcaatctgcttgctgcttaccgaccctaacccggacgaccctctcgtccccga

SEQ ID NO: 8350 - DNA, 335 bp, Triticum aestivum
  Clone ID: uC-tsrow189038f10b1
ttcttgtcttacgctgctccattccatcatctcccccttgtattctccagagttgtgttcagtcagcacaagtcttgttcattcgttatcagcaactttgctccgtgtaagggtttatatctcgtgtgttttcttcgcaaaaaagtgctggtaactcttcctcttttaacattccccaagttgccaaatctagagctcaatatatagttgcaaatctcaacttgttagagaacaacaacgatcctaggttagtttgcaacgcttatcatttcgcaaggcacggttaactagaatactcgatcggctgcactaatttcccacgagcagattctcac

SEQ ID NO: 8351 - DNA, 222 bp, Triticum aestivum
  Clone ID: uC-tsrow189038f11b1
tcttccacgcgtccgcccacgcgtccggtttctggcgctcgttcgtcgcgaaataagccgaggtgtgtcccccctgatgtgtgcctgtacgagtgtgtgttcttgtgatgtctcctcgtgttgattgttcaggcttgtgcttgcgatcctgtctaatcttgtactgaaatgagcattcctgtgctctggtttaataataaattgtgcccaggtatttatctc

SEQ ID NO: 8352 - DNA, 404 bp, Triticum aestivum
  Clone ID: uC-tsrow189038f12b1
gcagaatgggatgacaatccagtggaccgggtacccggtcgggtacaacccgatgggtagcagcgaggattatatcattaaccatctcaagttcagggttttggtccacccctaccaggcacaaggtgatgttgtggtcacgagtgaggatggtgttgccatggttgagtctgaccgcaagagtggcttccagattgttggttttgaggttgttccttgcagtgtgaagcgtgatcctgcagccatggccaagctcaagatgtatgagaaggttgactctgtgaactgcccgttggagctcgagaaatctcaggtgatccgtgaaaaggagcagattacatttacctatgaggttgagtatgtcaagagcaacatcaagtggccgtcaaggtgggatgcatacc

SEQ ID NO: 8353 - DNA, 113 bp, Triticum aestivum
  Clone ID: uC-tsrow189038g02b1
tcgctcacgcgtccgtccacgcgtacgcacggagctggagctctgcgtcgggctgcggtacgactggggcaagtactacgcattcaagtccttctacgaccccgtgaagaagc

SEQ ID NO: 8354 - DNA, 301 bp, Triticum aestivum
  Clone ID: uC-tsrow189038g03b1
tgacagaggaccagctcacgggtttgaaagctcactctagttgggtcgaatcactggctatggacccaagccggtcatttgtgctggcagcatctgccgactgcttgatcaagctttgggactgggagaatgactggaccagcgttcgaacattcagtgaacactcagacaatgtgcagcaagtcatgttacaccagcaggaaaccaacacttttggcagtgtttcaaaggattgcaccgcaaaggactcgagcattacttctggtgattctttggccacattgagcagtaaatcacaaca

SEQ ID NO: 8355 - DNA, 392 bp, Triticum aestivum
  Clone ID: uC-tsrow189038g04b1
ttccacgcgtccggttctgttcctcggccattctagccaccatgccgggctccatcgccttcggtcgcttcgatgactccttcagcttggcctctttcaaggcctacatcgctgagttcatctccaccctcatcttcgtcttcgccggcgtcggctctgccatcgcctacactaaggtgagcggcggcgcgccccttgacccatccgggctgattgccgtggcgatatgccacgggttcgggctgttcgtcgcggtcgccatcggcgccaacatctccggcggccacgtgaaccctgccgtcaccttcggcctcgccctcggcggccagatcaccatcctcaccggcatcttctattgggttgcccagctcctcggtgccatcgtcggcgcc

SEQ ID NO: 8356 - DNA, 387 bp, Triticum aestivum
  Clone ID: uC-tsrow189038g05b1
tccgccgcactatttccagtaaacaacaatacccactccccacccgtgtacgtaccattcgcccgtccccccaagaactcgtgctccctccctccccaatccccatcctccctccacttgccgcacacacgggggtggtctattgtccgtcgagactctctgtttgggttccaagaagtgtgcgcgggggagacgccggagatgggttcctgcgcgtcggtccacaaggaggacgtcgagctgcccaagaagcagcagctgctcgccccctcgccgccgtccaaggacggcacccccgtcggcgacgtcctcgtcgacctcaagcgcaagatcgaggggttcggccctggcggcaggacccctgactccggtagcaaggatgagatg

SEQ ID NO: 8357 - DNA, 405 bp, Triticum aestivum
  Clone ID: uC-tsrow189038g06b1
tcttctctccagatggcacaaaggttaatgctgctgaggcatttaagatcgccgacatccagcatggcttcttcgagctgcagccaaaggaaggcctagccatggtgaatggcacggcagtgggctcagggcttgcatccatggtgcttttcgaggctaacatccttagcctccttgctgaggtcttgtcagccgtcttctgcgaggtgatgaacggcaagccggagtacaccgaccacttgacccacaagttgaagcaccaccccgggcagatcgaggctgccgccatcatggaacatatccttgaaggcagctcctacatgatgctcgcgaagaagctcggtgagcttgacccattgatgaagccaaagcaagataggtatgccctccgcacatcaccgcagt

SEQ ID NO: 8358 - DNA, 458 bp, Triticum aestivum
  Clone ID: uC-tsrow189038g07b1
ttttcctcctcgggcgcagccattgtcttctggctcatatctcccctccccctcccctcctcgtccgcctcagacgccattaaaccccacctcgcctacgactgccggcggcgagccccgaccggagcagggatcgagcccgccgaaggggggaagacatggggacactcgggcgcgcgatctacacggtgggcaagtggatccgtggaacggggcaggccatggaccgcctcggatccaccatccagggcggcctccgcaccgaggagcaggtgtcaaggcatcgtacagtcatgagcatatttgacaaggagcctaggatcaacaaagatgtttttgttgctcccagtgcatctgtcattggtgatgttgagattggacatggatcatcgatctggtatggctccgttttgagaggtgatgtcaacagtattcgtattggatctggatcaaatata

SEQ ID NO: 8359 - DNA, 413 bp, Triticum aestivum
  Clone ID: uC-tsrow189038g08b1
ttcttcccacgcgtccgatcaaaccccacacacgcacacgcgcgcgcgcacacacacacaaaaaaaagcagagagggaggagatggccggagacgggcgtcgcgtggtggtcttccccttcccgttccacggccacgccacccccctcctccgcctcgccagcgttctccacacccgcggcttcgcggtgaccatcttccacaccgagctccgggcgcccgacccggccgagtaccccgcggactaccgcttcgtgcccctgcgcgtggacgtgcccccggagctgatggcgtccgaggacatcgcggggatggtcacggccatgagcgagtactccgaggcgcccttcaaggaacgcctgaccgcggcgctcgccgaggaaggcgccggtgtccggtgcgtcatcgccgacg

SEQ ID NO: 8360 - DNA, 302 bp, Triticum aestivum
  Clone ID: uC-tsrow189038g09b1
ttcttgcgtagaatatccaaacttcaatcgaatctcaaggtgaagatttgccagacaccatgaaagagcaactgaaagcaagcaggattaagatcttggctgccttcctggtcttcgccatggttactcaaggcttcgcgattcgtgtcaaggggacagtgaggaatgacatgacagatgaggctatcagcacgaaaaccaccctcggtgcaggcagcagcacaacggtggacaaccaccatgcaatcccacgggatcagtatagtagccatggaggagaggacggatctggtggcagtggt

SEQ ID NO: 8361 - DNA, 357 bp, Triticum aestivum
  Clone ID: uC-tsrow189038g10b1
tctcggacgcgtgggcggacgcgtgggtccggcttggcttcttccacccgtacccgtagattgatttccatccgggtcccttccgttccacggcaagtatccgtcgcacgattcaggcccacccctcgacgtcgtccatggcgctgcagtacgtggaggcgcagcggcaggcgcggccggacctcgccgactggtacgccgacctcgccgacctctaccagcgcaagctctggcaccagctcaccctcaagctcgaccaattcctccagatcccggccgcacagactggcgacacgctcatacagctctacaacaatttcatctccgatttcgaaacaaaaatcaatttgctcaaac

SEQ ID NO: 8362 - DNA, 382 bp, Triticum aestivum
  Clone ID: uC-tsrow189038g11b1
ttcccacgcgtccgctcaatgatggtactatcatgacaatatccaaggacagagttaagccatctcccttgcccgacagctggaagctcaatgaaatcttcgccactggtgttgtgctcggaacctaccttgccctgatgactgtcgtcttcttctgggttatccacaagacggacttcttcacaaacaaattcggtgtcaggtcaatcagagacagtgagtttgagatgatgtctgcactgtacctccaagtcagtattgtgagccaggctcttatattcgtgactcgttcacgtagctggtcctttgttgagcgccctggtttcctcttggttaccgccttccttctcgcacaattggttgcaacactcatcgctgtcta

SEQ ID NO: 8363 - DNA, 250 bp, Triticum aestivum
  Clone ID: uC-tsrow189038g12b1
ttcgagatgccctactgtaacatacacacacacacaatttgctagctagctaatcgatcagccagccatgtcggaggagaagcaccaccacctgttccaccacatggagggcgaggacttccagcccgccgctgacggcggcgtcgacacgtacgggtactctaccgagacggcggtgaccgccaccgacaacgactgacatgacgagcggatcaccaaggaggagaagcaccacaagcacaaggagcac

SEQ ID NO: 8364 - DNA, 199 bp, Triticum aestivum
  Clone ID: uC-tsrow189038h01b1
ttcgtttccggccgctcaggcggatccaggtggagggggagctcgctgccccgccccctgccccgccggcggaggaaatcggcgaagcggctgcggtgcccgcggccgggatgctcatgggtgccaaggtgcggcgccgcgcggccgtctaccgcgactgcatgggcgactacatcggcgtgcacaacgacccgtgcct

SEQ ID NO: 8365 - DNA, 310 bp, Triticum aestivum
  Clone ID: uC-tsrow189038h03b1
tttatatgggaaacataggaggacaactttgcaagaatgatggccactccttcaaggagagctgcagtatcacaaattctgaagtcctcaccagagtgaaatggtcagaagaggaagataaggtgctcactcaaatgatcaacaaacatgggctgaaaaactggcaaacggtcgcacatgctatacctggccgaagtgcaccgcaatgccgacaaaagtggagatacaaaatagactctgcaataaacaaggaggcgtggtcggaacaagacgagttgagactgattcgtgctcatcaaatctatggaac

SEQ ID NO: 8366 - DNA, 116 bp, Triticum aestivum
  Clone ID: uC-tsrow189038h04b1
ttcgtacgcgtgggctgttcgctgtatcgcgagtgtaatttcattagaaagaaagcgaggtctcctgatgattctgtaacagttttatccgtaggtcttgaggaattttttgggtc

SEQ ID NO: 8367 - DNA, 365 bp, Triticum aestivum
  Clone ID: uC-tsrow189038h05b1
tcgtgcccatcgttgcgcctcagtcgccacaaggacatctggtggaggggatccggtgcgaacgacgcacatctcggccccgtagcaggagcgggaggtgtcggcggcggagatggtcgatgtggagcctctttttcccgcgatctggtcctccccattcatggccattggcaggagggtcccctcggatttattccatcctcggaggtggcaaccgccctaggaggggcggtgcacgggcacggctatcttggtggtcgtgatgttgttccgcaactggttcgccttcgggtcggcgccacagatgaggcctgctgttgcgaccttgccctcgttcccgcggcgacggactaccccccaagatg

SEQ ID NO: 8368 - DNA, 364 bp, Triticum aestivum
  Clone ID: uC-tsrow189038h06b1
ttcttacatggcagttatggaatcagccaagctgaatgctgcagagaagaaggtcacaactgttggaaatgacggcctctcccttatggcacagcagcacactacacaaacacaggctgtgagaaagaaagtaggcggaggatgggatcccacgtatacaaagagaagctttttcccatattggagatcagtgttacaagctggggttcctttgaaggtgtatccagcccatgcaagctcagatcctaggtctcgtgttaaccatggacaactccatgtctctctgagtaactcaatagccaatggatctacaacaactccaaatcataaacttggtcgaacctcgccacttacaagcaataat

SEQ ID NO: 8369 - DNA, 248 bp, Triticum aestivum
  Clone ID: uC-tsrow189038h07b1
ttccacgcgtccgcgggaaggagctctgcaagagcatcaaccctgacgaggccgtcgcgtacggagccgccgttcaggctgccatcctcactggcgagggcaacgagaaggtgcaggacttgctcctgcttgacgtcacgccgctctcgcagggcctggagacggccggaggcgtcatgaccgtgctgatcccgaggaacacgacaatccccaccaagaaggagcaggtcttctccacctactctgac

SEQ ID NO: 8370 - DNA, 297 bp, Triticum aestivum
  unsure (1)..(297): unsure at all n locations
  Clone ID: uC-tsrow189038h08b1
ttcttcccacgcgtccgccacgcgtccgccacgcgtgcgtccacgcgtccgccaaaatccaaacccaagccaagaacacacgctgttctgaatctgtccatcagtctccgcttccactgattcgtccagccgagaagaagaagagctgcagaagatgagcaagctctggaccatnctcacccacctccacaccctcgcagggcctggcgtgatgctcctgtacccgctgtacgcgtcggtgcaggcgatggagagcccgtcgaagctggacgacgagcagtggctggcctactggat

SEQ ID NO: 8371 - DNA, 300 bp, Triticum aestivum
  Clone ID: uC-tsrow189038h09b1
ttctgctgcctgacccctgcctcttcgagcaggcacacagcgtggcgctgtgggagatgtccgagcacgatgcgccattggacgcgctgatcaacaacgccatggtctcggacagccgcttcatcatggacatcgccgtcagggagagcggcgacgttttccgggtgataagctccctggtcgacgtcggcggtggcctcggcgcggcggcccaggtcatctcggaggcgttcccgcacatggagtgcagcgtgttggagctcgagcacgtcgtcagcaaggcgcccgccggcaccagcg

SEQ ID NO: 8372 - DNA, 390 bp, Triticum aestivum
  Clone ID: uC-tsrow189038h11b1
tgtacagcaagtcctcagctaaggggacttcggaacattttgcggctttacattaaaagggcaaattgttctgaatgggagcaaattcaaatgccttcaagtgttagatcactagtggtcttaaatctgtacaactacggcagtggaaggcatccatggggtgatcttaaaccagattatcttgaaaagaaaggttttgttgaagctcattcagatgacggtttgattgaaatatttggtctgaaagaaggttggcatgcttcattcgttatggctgagcttatcaaagcaaagcacattgctcaggctgcagctatcaagtttgaaatgaggggaggcgagtgggatcgagcatatgttcaaatggatggcgagccatggaaacaacca

SEQ ID NO: 8373 - DNA, 429 bp, Triticum aestivum
  Clone ID: uC-tsrow189038h12b1
ttctttatccccccccgcccctccccccacgaacccacagcgcgcacccgagatccgcagccgaagcccgtgagaacagcgaagcgcgacaggaaaggcactgaactagtttgcaacaaagaagagagaaaatgtctaccgctgaggcaacccgtgaggagaatgtgtacatggccaagctcgccgagcaggctgagcgttatgaggaaatggtcgaattcatggagaaggtggccaagaccgctgatgtaggtgagctcactgttgaggagcgcaacctgctctctgtggcttacaagaatgtgattggtgcccggagggcttcctggaggatcatctcctccattgagcagaaggaggagagccgtgggaacgaggcctatgtcgcatcaatcaaggagtaccgtaccaggattgaaaccgagctca

SEQ ID NO: 8374 - DNA, 161 bp, Triticum aestivum
  Clone ID: uC-tsrow189040a04b1
tttttaattgttgcaattttgcgtgaacatgggtactttatcattgtaagttttgttactggagtagctttcttgggtttgtacctgatgcagtttaccatgaacatgatgggtactctattgtcatgagtttgccagagttgtatgttagtttctactca

SEQ ID NO: 8375 - DNA, 376 bp, Triticum aestivum
  Clone ID: uC-tsrow189040a05b1
tcgcacatcccgtggaggacaggagagaggcggcccgccgccggcggaatcaaacgcggcggcgctccctctacgcccccctgaggcccaccgacctccgccaccccgcgcagcgaggccgaccactgaatcactgatgacctgatcagagcaggttaggaggggaaagataaaattataggggcctctcgatactcctgcctgcaagtaggtgctcagccttgatggcgatgcccggatcctgcccgtcaacaacggcggctccatctgccggccaccctcccatctgccttgccgacgcttcagctgggggagctggatcccaagacatgctacgaccacgcctggtgctcttcggcgactccatcactgagca

SEQ ID NO: 8376 - DNA, 240 bp, Triticum aestivum
  Clone ID: uC-tsrow189040a10b1
tttttgcaaatcccaatttttcgtggcctgcgggtcgctccgatcctcggcggccggccggcagcccagtcccagatccgaatcccgagacgcgtctagccattgccgccgtccccgaccttctccccggcagggaatggtgcactgcgggcggcggtaggcagacacgagcagagaccgtgtggcaagaagcggcggctgcgagatggccggcgcggagagggagaggagaaagatgcc

SEQ ID NO: 8377 - DNA, 459 bp, Triticum aestivum
  Clone ID: uC-tsrow189040a11b1
tttcggtcccgatcctcgatctgttctcaaccctccctccgtccgtcgcagctccagatttccttccccatggctccgatcaagatcggcatcaatggtttcggccggatcggcaggcttgtggccagggttgcgctccagagccccgatgtcgagctcgtcgccgttaacgaccccttcatcaccaccgactacatgacctacatgttcaagtatgacactgtccacggacagtggaagcaccatgaagttaaggtgaaggactccaagacccttctcttcggtgagaaggaggttgcggtgtttggctgcaggaacccagaggagatcccatgggctgctgctggtgctgagtacgttgttgagtccaccggtgttttcactgacaaggacaaggctgcagctcacattaagggtggtgccaagaaggtcatcatttttgctcccagcaaggatgct

SEQ ID NO: 8378 - DNA, 377 bp, Triticum aestivum
  Clone ID: uC-tsrow189040a12b1
ttgcccacgcgttcgcccacgcgtccgcccacgcgtccgctttgatggacctgtgccatcgccgttcgaggacgtgcatggcgcggccatcttcgaggagagcatgacgctcctggacccggagatggatcagctgatccacgacgccgtcgctgctcacgaccacatggggatcggccccgtgctccggcagtgccgtgagctcttcgaggggcttgagtctctcactgactgcggcggcggtgatgggacgacggccaggtccatcgtcgaggcctacccgcacatcaagtgcactgtgctggaccttccaaaggtcatggacaaagttcttcttcccgctgaagaaggagcggttaagtatgtttctggtgacc

SEQ ID NO: 8379 - DNA, 413 bp, Triticum aestivum
  Clone ID: uC-tsrow189040b04b1
ttccagcagctgcgcaaaggctcctcaaaccctaaccctagtcctagcttagcttccttcttctcgatctagctagagccatggcgccgaccaagggcgaggggccggccatcggcatcgacctcggcaccacctactcgtgcgtcggcgtgtggcagcacgaccgcgtcgagatcatcgccaacgaccagtgcaaccgcaccacgccctcgtacgtcgccttcaccgactcggagcgtctcatcggcgatgccgccaagaaccaggtcgccatgaaccccatcaacaccgtcttcgatgcgaagcgtcttatcggcagaaggtttgctgatgcccctgtccagagtgacattaagatgtggccgtacaaggttattcctggccctgcagacaagcctatgattgtagtgcag

SEQ ID NO: 8380 - DNA, 306 bp, Triticum aestivum
  Clone ID: uC-tsrow189040b05b1
tttttgttcgcgcccaccgacaacgccttcacctcgctcgcctccggcacgctcaactcgctgtccgacagccagaagaacgcgctcatccagtaccacgttctctccaccgccatccccatgtcgcagttcgacaccgtcagcaacccgctccgcacgcaggccggcagcacctcccccgcccagtacccgctcaacgtcaccgccgagggccagcaggtcaacatcaccaccggcgtcgtcaacgccaccgtcgacaacacgctctacaccggcgaccagctcgtcgtctaccaggtcaacaag

SEQ ID NO: 8381 - DNA, 392 bp, Triticum aestivum
  Clone ID: uC-tsrow189040b06b1
ttcttggatgcgcagccagcggcatccgtgctgtacgtgagcttcggcagcctggcgtgcatgtcagcgcgggacctggtagagactgcgtggggcatcgccggcagcggcgtgccgttcctctgggtggtccggccgggccttgtagcctcggacgggctgacgcggctgccggacgggttcgaggcggcgacgagcgggcgcgggatggtggtggagtgggcgccgcatgaggaggtgctccggcacgcggccgtggccgggttctggacgcacggcgggtggaactcgacgacggagagcgtgtgcgagggggtgccgatgctgtgtcgcccgcacttcggcgaccagatggggaacgccaggtacgtcgagcacgtgtggagggtggg

SEQ ID NO: 8382 - DNA, 85 bp, Triticum aestivum
  Clone ID: uC-tsrow189040b10b1
aaaccaacaacaacttgcatgtgactgacttgaggtaactatgccaaaggacaggagctcccgttcagtctcgcatgagggctgc

SEQ ID NO: 8383 - DNA, 320 bp, Triticum aestivum
  Clone ID: uC-tsrow189040b12b1
gtccgggaaaacaagagaaaagatgagtgaaagaagctcaaatcaaatggcatcctccccttccttccttctccttgccgctcttcttgccttggtctcatggcaggccattgcctccgaccctggcccgctccaggacttttgtgtcgccgacatgcattcaccagtgcgtgtcaatggatttgattgcaagaacccgatggaggtcaatgctgatgacttcttcaaggcagccgccctcgacaagcctagggtgaccaacaaggttggctccaacgtcaccttgatcaatgtcatgcagattgccggactcaacaccc

SEQ ID NO: 8384 - DNA, 391 bp, Triticum aestivum
  Clone ID: uC-tsrow189040c04b1
tctgtccacgcgtacgaggacgcgtgggcgcagccgccgcctcctcggatcgtccctgccggagagacgccagagagagcgagcaaaccctaacctccgacgatggtgctgcagaacgacatcgacctcctgaacccgccggcggagctcgagaagctcaagcacaagaagaagcgcctcgtccagtcccccaactccttcttcatggacgttaagtgccagggctgcttcaacatcactactgtgttcagccactcccagactgtcttggtgtgcccaggctgccaaacagtgctctgccagccaacgggtggcaaggccaggctaaccgagggttgctccttccgccgcaagggcgactaaacctccgaagtctatctgaaaaagcaag

SEQ ID NO: 8385 - DNA, 351 bp, Triticum aestivum
  Clone ID: uC-tsrow189040c05b1
ggaagggatagttccatcagtacatgcttgaggaacactatgtttgacaaccaagataggttacttcggtagaacgtcagaaaaattatagctggggttaggatacctctcgagaagcagtatatgcctcgctagcacacaagaacagtcaggaccatgtacgaatcggacgaacagttggggctatgtcacaccaccaatcgaacagttccgcgccgggacctgtgtctcgctcgcagccgcgccggcacccgtggatcgctggaagcctcgccggcacccgtgtctcactggcagccgcgccggcaccgggggcaaagtttgaagaaacaggcctcacacacctgatcc

SEQ ID NO: 8386 - DNA, 385 bp, Triticum aestivum
  Clone ID: uC-tsrow189040c06b1
tcttccttccctcctctcttccccgctcccctcccgcggcgccctcgtcttcaagaagccgtctgcttcgtcgctcgcagtctcaacggcgaagcgtggagtccgggtggtcgcagaggccgcggcggtatcgtcccccgcatcgtcggtgtcggcacagcggacccagccgtcggcagccgaggtggcgcggacggtggttgagctcgcgccttccgggacgctgtccgtcgtgggcgccgacagttgggcgctcggtgtcggcgctcgttttgtcgccgacgccgctggcgcgcccgcgctctgcctagccacagcgggagtgaccgtgcctgatgcgcgggcaagttttcacgttgagtttcggcaaagtggagccaggaca

SEQ ID NO: 8387 - DNA, 396 bp, Triticum aestivum
  Clone ID: uC-tsrow189040c10b1
ttttcgcggacgcgtgggcgccgccgctctccaaggtcccaaggctccagatctccctctctcgcagctacctcggtggcctttggagcgcacgagatggcggaagaagccccatcaccagttgttgtcccagctgaggcacctacccccggttcttggggaagccaaggaactgtgtgactgctctacagcttgtcatgaagaagtcaagcgctcatgatggccttgtgaaggggctccgtgaggctgccaagtccattgagaagcatgctgctcagctttgtgtgctggctgaggattgcgaccagcctgattacgtgaagctcgttaaggcactatgcgctgagcacaatgttcacctggttactgtgccaagtgctaaaactctcggagagt

SEQ ID NO: 8388 - DNA, 166 bp, Triticum aestivum
  Clone ID: uC-tsrow189040c11b1
tttttgtttcaagaatgcaaaatgctttggttatgatatttctgctcaacagatgcctccaaactatttattctgggccaatgtgtaggatgcttgtaggcgatgtctatgcagaatatcaccgattgggcatgccaccaagcaccggtgctccatgagcaaaagc

SEQ ID NO: 8389 - DNA, 285 bp, Triticum aestivum
  Clone ID: uC-tsrow189040d04b1
tgcggggatcacgctgctcgactggtgccgcaacgagcagttctacatgatcggggccacgggcgtgtacccgacggcggtgctttacatggcgctcaagctcgtcaccgggaaggggatatacttcaggctcacgtccaagcagacggacgcctgctccaatgacaagttcgccgacctgtacaccgtgcggtgggtgccgctgctgctcccgaccatcgtggtgctcgtcgtgaacgtcgcggccgtcggggcagcgataggcaaggcggcggcatgggggtt

SEQ ID NO: 8390 - DNA, 187 bp, Triticum aestivum
  Clone ID: uC-tsrow189040d05b1
gcttgtcgttgtgctctcggccctgctcctgctttctctcgtcgccgtctcatccgccgaggaattcgatttcttctaccttgttcagcaatggccagggtccttctgtgacacgaagaaggggtgctgcttcccggacaccggcaagccggcgacggacttcggcatccacgggctatggcccaac

SEQ ID NO: 8391 - DNA, 353 bp, Triticum aestivum
  Clone ID: uC-tsrow189040d06b1
cccgaccggcgcgctggaccccgggctggtgtacgacctcgcggcggacgactacctgagcttcctctgcaactacggctacggcgcgtcccagatcaagctcatcacctcccctccggccgccttcagctgcgccggcaacgcgagcaaggatctcatctccgacctcaactacccgtcgatcgccgtcacggggctcggcgccggcgccagcaggacagtgacccgtgaggtcaccaacgtcggagcgcaggaagacgccacctataccgtcgccgtcagcgcgccggccggtctggatgtgaaggtcgtgcccagcaagctccagttcaccagcagcgtgaagaagctgg

SEQ ID NO: 8392 - DNA, 325 bp, Triticum aestivum
  Clone ID: uC-tsrow189040d11b1
tctgctgtacatctctctctcttatctctcccagaaattcctccttcgtcccgcccctcttttttttttcccttatctctctctgagaaaattagtttctacccgggcctgggccgccggagcgagcttctggccgctccccaccgcctgtggtctcccggcgccggctggatctgaggagctgcggtgtttgcttgcttcttccttcaaggtttcttgcaaatttgggtgaccttgaaagcttgtgaagaaggggttgttggccaagtaaaagatcctggagctggcttagagtgttgtccataaaaaaaaatcatgggtgctc

SEQ ID NO: 8393 - DNA, 322 bp, Triticum aestivum
  Clone ID: uC-tsrow189040e04b1
gcgtccgcggcggaagaaagaggagagagctccagccatggtgcacgtcaacttctaccgcaactatggtaagacattcaagaaaccaaggcgtccttatgagaaggagcgtcttgatgcagaactaaagctggtcggtgaatatggactgaggtgcaagcgtgagctctggagggttcagtatgcactgagcaggattcgtaatgctgcaagacacttgctcacactggatgagaaaaatccccgccgtatctttgagggcgcggcccttctccgtcgcatgaaccgctatggtctccttgctgagggccaggataagctt

SEQ ID NO: 8394 - DNA, 380 bp, Triticum aestivum
  Clone ID: uC-tsrow189040e06b1
ttctttaaatggtgtttgtgtatcatttaggtcttcttggaagtgtagcgccatgtgttctgtatggtagccatagtataggaatcttaaaactactgttggctggctcacacatgacatttttaatttttagtagacatgcctttgataagatgcattgttcagttctaattaagtaattatggaccttttgaattacgggccaagccccgtggtgtgctaaatgttgttatctacctaagcacctggacttttgtatgcagagggttatcagctattaaacagcatatgacaatcctgttctggccatctgatgtttgtatgtttgagttgttcgtgttcgttgtagtgcatgaggcgggatttattgtgatggctct

SEQ ID NO: 8395 - DNA, 51 bp, Triticum aestivum
  Clone ID: uC-tsrow189040e08b1
gaacagtcagcaggacccgcgagcgaccgaatcccgatcaatcgcggcgcg

SEQ ID NO: 8396 - DNA, 244 bp, Triticum aestivum
  Clone ID: uC-tsrow189040e10b1
tgatgactggcattgcgtacagacattagctgaagctggtaacggtggtcattcctcaacagtatggtcggtatcttttaaccagaaaggagataggatggtcacatgcagtgatgactgtactttgaagatttgggatacgagtgctgatttgtctgagccaacaactggagaaggtcatgaatcttggtttcatctttctactttatctggacatcatggtcgaactattttttcagcccat

SEQ ID NO: 8397 - DNA, 265 bp, Triticum aestivum
  Clone ID: uC-tsrow189040f04b1
tgaaccttgataagactcgacaatataatatcattcacatgattaacgttagacaaatacatacaacctatgagtacaacggatgcctaatacccagtatccaccatgctaccacgagattagcagcaagaacaacatgtttattttgtatacgacacaataaatagaaggaaataaaatatattgttcacattgatatgtaacactaactttacacctgaacgccttcgttccgactttacaagactacaacaggagctatggc

SEQ ID NO: 8398 - DNA, 350 bp, Triticum aestivum
  Clone ID: uC-tsrow189040f05b1
tctctgacgcgtgggatgcattgccagaaatgttcctcgtgggcttggttctcctgtatttgacaaacttgaagctctactggcaaaggctatgctttctcttcctgcaagcaaggggtttgagatcggtagtggatttgcaggtactgacctaactggaagtgagcataacgatgagttctatatggatgaggctggaaatgtgagaacacgaaccaatcgctcggcggtgtacagggagggatatcaaatggtgaaactatatacttcaaagtagctttcaagccaacagcaactattgggaagaagcaaaatactgtaacaagggatcatgaggatatcgaacttct

SEQ ID NO: 8399 - DNA, 328 bp, Triticum aestivum
  Clone ID: uC-tsrow189040f06b1
ttctagcaacatgcacaagctaactttagatggcattgatgtgatgggtgaacggttggcacaagaggttattgaagaaatcaacaaaagaccacagataacaaagatatcttttgttgcgcattccgttggaggattggttgcaagatatgccatcggaagactttatagacctcctggacaatcacttgaaaattctcctcaaagtttgagagacagcaacagaggcaatatacatgggcttgatgcagtcaacttcataactgttgcatcaccacatcttggttctagaggaaacaagcaggttcctttcctttttggagttact

SEQ ID NO: 8400 - DNA, 99 bp, Triticum aestivum
  Clone ID: uC-tsrow189040f10b1
tgtgaacggaacggttatgtacccccaaacttgctccaattttggtccttgtggatatgtacctgattcggccctgaacctttttggatgtgtaatact

SEQ ID NO: 8401 - DNA, 218 bp, Triticum aestivum
  Clone ID: uC-tsrow189040g05b1
ttatcaatgtcttgcactaagctcatatcgcttaccctggttgtcctgtttagcattggattagccagcgctggtagggtatctagatactctagttcccagggaacaggcactggaggtggagagggtggaggagcggtgaacggcggcggcggaggaagtgggaatggccagggcactgctcatagtggaggtggaggaacccatgcaagtgctgg

SEQ ID NO: 8402 - DNA, 363 bp, Triticum aestivum
  Clone ID: uC-tsrow189040g06b1
tttttgcactctgtgattgagaagtacgctgagcgtgggcttcgttcgcttgctgttgcaagacaggaagttcccgagaaatccaaggattctcctggtggaccatggcaattcattggtctgttgcccctgtttgatcccccaaggcatgacagtgctgatgaccatccgcaaggcacttgttcttggtgtcaacgtcaagatgatcacaggtgaccaacttgctattggaaaggagactggtaggaggcttgggatgggcacaaacatgtatccttcttctgcattgcttggccaaagcaaggatggttcacttgagtcacttcctgttgatgagctgattgagaaggctgatggatttgc

SEQ ID NO: 8403 - DNA, 205 bp, Triticum aestivum
  Clone ID: uC-tsrow189040h06b1
tctttcagtaaccctgttgatctgaaaccctatctgagctaagaccacagtagcttttatggtaacaccatttcttacaaacgccatagaagcttctatagtgacataaattttacagacgcctaagacacattcacgtgctgttagttctgagttggtcatttggacgatatctcgattctggacttggcctaccttgtttttt

SEQ ID NO: 8404 - DNA, 322 bp, Triticum aestivum
  Clone ID: uC-tsrow189045a01b1
ccgatcaaggacaaataccccagtataacttatgcggatttattccagttggcaagtgctacagcaattgaggaagctggtggcccaaagattccaatgaaatatggacgggttgatgtcacaggacctgagcagtgtccacctgaagggaagcttcctgatgctggcccgagtgctcctgctgaccacttgaggctggtattctacagaatgggccttgatgacaaggaaatcgttgctttgtctggggcacatacacttggaaggtctaggcctgaacggagtggctgggggaaacctgaaacaaaatatactaaaaatg

SEQ ID NO: 8405 - DNA, 370 bp, Triticum aestivum
  Clone ID: uC-tsrow189045a02b1
tctttttatgacaatggcagagcgcctcgggactgctcttatgcaggatcctactatgtccagtatgctggaaaatttgactagtccaacacataaggaggagcttgaagagcgcatgtctcggattaaggaagatccagccttgaagccaattcttgatgagttagagaatggtggtcctgctgcaatgataaagtactggaatgaccctgaaactcttcaaaagattggccaggcaatgggaactaccatgccgtttagcactgtctctactgctgaaccttctggtactgaagaaactgaagaagaaggtgaagatgaagacgaatccattgtccaccacactgccagtgttggtgacggtgagggt

SEQ ID NO: 8406 - DNA, 406 bp, Triticum aestivum
  Clone ID: uC-tsrow189045a03b1
tcgttaccctagctctagctagagcagcagcgtctcccccgccgccgccgtcctcgcctccgggcgctgaggatccactgcagacgaagatggcgctagcgatctcgatggaagccatagatgcgcgcgcgcgggagctggggatcgacctcgactccgtcgacgtcgactccatcaccctcccgcccggcgaggacttcgacatcctcagtgatgatgaggatttacttcagaatgaagacattccagagctggagatgggcttttcaaacattattgtggtggacaatctgcccgttgttcccccagaaaagtatgagaagctggagaacgtcgtacgcaagatatacagtcaaattggtgtcatcaaagaaggtgggctttggatgcctacacacccagagac

SEQ ID NO: 8407 - DNA, 349 bp, Triticum aestivum
  Clone ID: uC-tsrow189045a07b1
ctccaagtctgggatagctcaagcgacggcgacatatccagtgggattcatttcatctcttctgcaatattggaggcatcagcacgcagaagccaaaggccccaagctggaggacttcctgagcgtcggctacggcaacgacaggagcagcggcagcgtctacgacgccagccacgccgaccagctcaagtaccaccaccaccaggacgtccatcacgcctatccaggctcgccctacttccagggcaatggctggcggtggcgccgtcatcgggctggacatcaacaacgcgccgtcgtcgtcacactgcaccggccttccggaccaccactacatgccggcgcacca

SEQ ID NO: 8408 - DNA, 413 bp, Triticum aestivum
  Clone ID: uC-tsrow189045a08b1
tgatcgcccacgcgtccgcggacgcgtgggtaaagattgcacaaggggctaagcctggtgaagggggtcaacttcctggcaaaaaagtcagcgcatacatagctcggttgagaaactccaaacctggtgttcctctgatatccccaccaccacaccatgacatctattctattgaggatctggcgcagctaatttttgacctacatcagatcaatcctaaagcgaaggtgtcggtaaagcttgtagctgaagcaggaattggaactgtagcctctggagtatctaaggcaaatgcagacgtaattcagatatcaggtcatgatggtggtactggagctagcccaattagctcaatcaagcatgctgggggtcctagggaacttggtcttacggaaacacaccagacactcata

SEQ ID NO: 8409 - DNA, 231 bp, Triticum aestivum
  Clone ID: uC-tsrow189045a09b1
ttttcaaaggccatcccgacgcacggtgtggcggcggtcatgaacgagttcgagggcgtggtgatggagatcgtcatcaccttcgcgctggtgtacacggtgtacgccacggcggcggacccgaagaaggggtccctcggcaccatcgcgcccatcgcgatcggcttcatcgtcggcgccaacatcctcgccgccggccccttcagcggcggctccatgaaccctgcccgc

SEQ ID NO: 8410 - DNA, 244 bp, Triticum aestivum
  Clone ID: uC-tsrow189045a10b1
tcgcccacgcgtccgcccacgcgtccgcccacgcgtccggtgccgatgaagacgacaggagggggcagcggacaaccagccatgtccggacttgtgttcttcctcttcctcttttccctcttcactgccgctgcctcgacgaccaagcaaagccaggtctatatagtgtatctgggcgagcacgccggagccaagtcgaagggaaccatccttgatgatcaccatgccctcctctccgtcaagg

SEQ ID NO: 8411 - DNA, 198 bp, Triticum aestivum
  Clone ID: uC-tsrow189045a11b1
gcggcgcagttgctccgcgagcccttcgagcggttcttggccgacaaccgccccgacgccgtggtgtccgacagcttttggcactggtccgcggacgccgtcgcggagcacggcgttccgcgcctcgcgttcctcggcaccagcatgctggcgcggtcctgcaccgaaagcatgctgcgcaacaacccgctggagacc

SEQ ID NO: 8412 - DNA, 344 bp, Triticum aestivum
  Clone ID: uC-tsrow189045b01b1
atcgtctcgcgtccgcggacgcgtgggcccaaaacgcacaagccttccttcccttccttccttccttcgccgaaatcctactcgagacccaacccctccccccatccgccgtctccccaccctccccgctcgttccccttgcttctccgggagggaaggaacccgcgaggccggcctcccaccctccgcaaaagccacgcgccaccaacccaacccctccgtcccgccccgccccgcgcgtcgctttcgcctttctccgcgcaaccgaaagagaccgaccgcgaggcccataaagagggaggcgccgaggccggcggctatgggcggcggcagcagatcgcgcg

SEQ ID NO: 8413 - DNA, 389 bp, Triticum aestivum
  Clone ID: uC-tsrow189045b02b1
tcgttgaagccgccgccggcgtcgccgtcctcgtcgagatcgtcgtcgactttctcgtcctcctcgtcgtctatggcgtctgggcaccaagaggatcgcagcagcgtggcatgcttgcccctgctccgcatgctcgaggaggggaagggggctggtggtgaccatgatcaccctgcacctccagtcaaggaagagatcatgggcagcggcgcggccgaggtgctggggcctggcgtggatctgaatatcggcttgccggttggtggatcttgcgatgatgacatcatggaggaggagagccaggaggaagatgatgaccacgactgtgacgaagaggaggaggaagagatggatgagttggaacctaaccatggcggttgcaaggtgga

SEQ ID NO: 8414 - DNA, 322 bp, Triticum aestivum
  Clone ID: uC-tsrow189045b03b1
atcgtccacgcgtccgcacatccgtcgccttctcgagcagatcaccagttcagttcaggacgcgcagatggcctcctacgagaagcagcagccgccgccgcagccgccggcgaacgcggcgccctactacgcgtacccggccccgcagcagccgtactacgcgcccccgcctccccctccgcccgccccgcgccggagcggccccggctgcctcctctgcttcgtcttcaaggtcatcgccctagtcatcatcgcgctgggcgccgccaccctcgtgctctggctcatcctgcgcccgggcgccgtcagggccaccgtcgtc

SEQ ID NO: 8415 - DNA, 340 bp, Triticum aestivum
  Clone ID: uC-tsrow189045b04b1
tcgtacgcgtccgcggacgcgtgggtcgtcaccccatcctcacatgcggtgttatgtgtttgggcatcccttttcttcacggtggctcctccttcactgccatgcccgaaggcttctatatactgcgttggcgggaaccaggaagagcagaggcagactttggcaggtatgacgtcaagcgagtcgtgcacaccatctacattctcttctctagaagcgaaatcccgacagcgaaggaagatcaagaaatcacggatctcgcggacctgtcgactccccttccagagtggttcaccgaggaggatcttgcagtctacacgtccctctatgagaaatcagg

SEQ ID NO: 8416 - DNA, 363 bp, Triticum aestivum
  Clone ID: uC-tsrow189045b05b1
tcgtagcattctaccaccgcaccgcacgagtgaagtgagagctttgcacgaaaagttcatcagcgaccatgaagggcaccaagctcgcggcgatcctcatcctccaggccgtcctggtcatgggagtcctctcacacgtgaacgccgactatttccccaagtgctgcaacaactgcaggtccttctccggggtcgacgtctgcgacgacgcccaccccaagtgccccaagggctgctcggcgtgccgcgtggtgtcgacgagccccgaaatgtggcgctgcgcggatatgaaatccaccgtcgacggcacctgcggtgggccctgcaagaagtactgatcggctcatgccagcatgatatgtt

SEQ ID NO: 8417 - DNA, 230 bp, Triticum aestivum
  Clone ID: uC-tsrow189045b06b1
gtcgtttgctcgccgcccttaagccagctcaggtagcatctagagccgacatgatggcggaggcgtgggtggacgtgctgccgccgccggcgccctacttcgccgggcagccgtgctgggccgtacagcaagagcgtcgtggaggcggcgcctggacactggaggagaacaaggtgttcgaggaggcgctcgcggcgatcgacctggacgcgccggaccggtgggagatg

SEQ ID NO: 8418 - DNA, 361 bp, Triticum aestivum
  Clone ID: uC-tsrow189045b07b1
tccggaactcctgaaacaatcaagagacacacacaggtctagcagatccagagccgaagatgagcggggtgaagaaggtgacggacgttgcggtcaaggccgggaaggcgatcgactgggacggtctggccaagatgctcgtctccgacgaggcccggaaggagttcgccaacctccgtcgcaccttcgaggacgtcaaccaccagctccagaccaagttctcccaggaaccaaagccaattgactgggaatactacaaaaagggaatcggatcgaaagttgtggatatgtacaaggaggcttatgatagcattgagatcccaaagtatgttgacactgtcacttctgagtacaagccaaa

SEQ ID NO: 8419 - DNA, 366 bp, Triticum aestivum
  Clone ID: uC-tsrow189045b08b1
tgatcgcggggagaagctcttgcccgaatggtacacggaaaaaggcattgagctgatcctgagcacggaaattgtcaaggctgatcttgcctccaagacattgaccagtgcagctggagcaaccttcacctatgagaccttgctcatcgccactggctcctcgaccataaagctcactgactttggcgttcaaggagcggaatcaaacaacatattgtatctaagggaaattgatgacgccgacaagttggtcgcagctatgcaagcaaagaaggatgggaaggccgtcgttgtctgaggtggctacataggacttgagctcagcgcagcactgaaaatcaacaatttcgatgtcactatggtgta

SEQ ID NO: 8420 - DNA, 336 bp, Triticum aestivum
  Clone ID: uC-tsrow189045b09b1
cgctatctccccaccgcttcccggccacctcagacaccgagccgcccctccccccttacccccaccccatatggcgctgccttcccgccccgtagccgtcctcgcatggggttcgggggaagacgggcagctgggcatgggccggtgcgacgagaaggactgggcccgctgcatcggcgctctggatgcgtacgctcgcttcgtcgacgtagccggcagccgcaactccctcgccatatgcgacgacggcagcctcttcacttgggggtggaatcagcggggaacgctcgggcacccgccggagaccaagacagagagctccccggcgcatgtcga

SEQ ID NO: 8421 - DNA, 274 bp, Triticum aestivum
  Clone ID: uC-tsrow189045b10b1
tttgttcgcccacgcgtccggtcttgaaggaccagaatatcatgcctggtatcaaggttgacaagggtttggttccattgcccggatccaacaatgaatcctggtgccaaggtcttgatggtttggcctcaaggtgtgctgagtactacaagcaaggtgcacgcttcgcaaagtggcggactgttgttagcatcccttgtggtcctactgcattagctgtcaaggaagcggcatggggacttgctcgctatgctgctattgctcaggacaatgg

SEQ ID NO: 8422 - DNA, 264 bp, Triticum aestivum
  Clone ID: uC-tsrow189045b12b1
tttcgtcgccaggacgcagggtaccaagattgcctcagtgggtctgaagcacagggtgttcgaagtatctctagctgatcttcagaacgatgaggaccaggcctacaggaagatcagactccgtgctgaggatgtgcaagggatgaatgtcctcacaaacttctggggcatggacttcaccactgacaagctcaggtctcttgtgaggaagtggcagacactcattgaggctcatgtggatgtgaagaccactgacaactacat

SEQ ID NO: 8423 - DNA, 335 bp, Triticum aestivum
  Clone ID: uC-tsrow189045c01b1
ttcttcacgcgtccgcggacgcgtgggttgatgtccgggatgacagcagcgtcgccgctctagcgcgacacatcgagagcagatacggaaagcttgacatcttggtcaacaatgcagcggttgttggagttgcagcagacgaggaaggcctcaaagctctgaaccttgatgcagagacatggacatctggcagagcagccactctgctcaaagacgtgttccagaatacctatgaggtggcacgggactgtctcgacaccaattactatggatccaaacgggtaacagaagccctcctttctctactgaaactatccacgtcgggagcaaggatc

SEQ ID NO: 8424 - DNA, 379 bp, Triticum aestivum
  Clone ID: uC-tsrow189045c02b1
tcttcacgcgtccgctcgttgcacaagaattcctcccaccctcgccgtctcgccgccgtcaccaccgcagctagataagagaaaaaaagagagagaagaactcgtcgggagggctcgagatctgtgttcggagaggggaattcttgaggtcggaatcggaacaagcgggcgcgctcgggatcggggttaccatacaatttttcccaggaacctttagtgaatgtgctaatggagtcaaagggtggcaaaaagtctagcagtagtagttccctgatgtacgaagctcccctcggctacagcattgaagacgttcgacctgctggaggcgccaagaagttctctgctgcatactcgaactgcgcgaagaagccatcctgat

SEQ ID NO: 8425 - DNA, 292 bp, Triticum aestivum
  Clone ID: uC-tsrow189045c03b1
atcggtgccactggacacttgactcgacggtcattgtccccgaaccttgatccacgtccgcccttctttctgggagggagggaggctgtcagccggccggccatggacactgcggaggcggcgtggggggtggcgagcctgcggctaggctctcgccggctaggctctcgctcctcgtaccgggagcgcggggccgacgtcttctcccgggcgttctccgcggccggggcgggctccgaggacgatgaggaggcgctcatgtgggcggcgctcgagaggctgccaacgcaca

SEQ ID NO: 8426 - DNA, 134 bp, Triticum aestivum
  Clone ID: uC-tsrow189045c04b1
acctaaagggctcgggaggaaactaagatctcaagtgtggtgacttttttttctgtgtgtggaaacttgagagagttgcaaggagggacaaccagggaggaggtagtcttggaggttgatttggggggaatttg

SEQ ID NO: 8427 - DNA, 186 bp, Triticum aestivum
  Clone ID: uC-tsrow189045c05b1
actgccacgcgtccgggccgattccctctttctggcactgagcggtgggctcatctttgggacgggcatgggattcgtgctgtggactaccacggtctgcaccaggttactagcagagcttgcttccagcggcgatgagcataggggactcattgcctacgcgtgctggctcgtctacatgctctt

SEQ ID NO: 8428 - DNA, 319 bp, Triticum aestivum
  Clone ID: uC-tsrow189045c06b1
ccacagggcctattataatggtaggccctgggactggccttgcaccttttaggggcttcttacaggaaagattagctttaaaagagaccggggtggaactgggccgtgccatcctgtttttcgggtgcagaaaccgccagatggacttcatatatgaggatgagctgaacaactttgccgaatccggagccctgtctgagttggtcgacgccttttctcgtgagggtcctacaaaggagtacgtccaacataaaatggcagagaaggtaacctgattgataactcaccgattatccatgtactgtcgttgattatatag

SEQ ID NO: 8429 - DNA, 278 bp, Triticum aestivum
  Clone ID: uC-tsrow189045c07b1
tatcgctctctcgactccggccagtctcttcttctctagaaagctagcgaggcttggaggtgagcgaaaatgccggtcagcaggatcgccgcggggagccaccgtgaggtgtacgaggtcggcgccctcaaggcggcgctcgccgagttcatctccacgctcatcttcgtcttcgccggccagggctccggcatggccttcagcaagctgagccccgacggcgcggtgacccccgccggtctgatctcggcggcgatagcgcacgccttcgccctgtt

SEQ ID NO: 8430 - DNA, 180 bp, Triticum aestivum
  Clone ID: uC-tsrow189045c08b1
cgatgacctcggcggtggcggcggcagagggagttggctaggatggccgctggggcgaggaggcggagccgatgaccccggcggtggtggcggccgaggggtcccaggggcgtcgttcagaggaagagcaccctgcgccagttcagcggtcgtggtgttacggaggaggcggagagaaag

SEQ ID NO: 8431 - DNA, 119 bp, Triticum aestivum
  Clone ID: uC-tsrow189045c09b1
cgctccgtgaagtggatgccgggcgggcagaagaggggcgggagcagggactgggaggaagaggggcggggctggagacggggaggaagaggggcggcgagggtggaggcggaggagga

SEQ ID NO: 8432 - DNA, 347 bp, Triticum aestivum
  Clone ID: uC-tsrow189045c10b1
tcgtcgatggcgatggcgtccatccgcctccttccgctcgctctgctgctcctcctgctcgctgcggcgcacgccgggaccccacggcaggagcccgccatccggctgccgtcgcagcgcgcggcggccgggcaggaggacgatgactccgtcgggaccaagtgggccgtcctcgtcgccggctccaagggctaccagaactaccgccaccaggcagatatctgccacgcctaccagatcttgaagaagggtggtctcaaggatgagaacatcattgtcttcatgtatgacgacattgcgcataacccggagaacccgaggccgggcgtcatcatcaaccaccccca

SEQ ID NO: 8433 - DNA, 443 bp, Triticum aestivum
  Clone ID: uC-tsrow189045c11b1
tcgtcgcccacgcgtccgacgctaactcgttgcacaagaattcctcccaccctcgccgtctcgccgccgtcaccaccgcagctagataagagaaaaaaagagagagaagaactcgtcgggagggctcgagatctgtgttcggagaggggaattcttgaggtcggaatcggaacaagcgggcgcgctcgggatcggggttaccatacaatttttcccaggaacctttagtgaatgtgctaatggagtcaaagggtggcaaaaagtctagcagtagtagttccctgatgtacgaagctcccctcggctacagcattgaagacgttcgacctgctggaggcgcaagaagttctctgctgcatactcgaactgcgcgaagaagccatccctgatatcgttttggcatccccttcccgtagtttaggatttttatgcaattttattct

SEQ ID NO: 8434 - DNA, 347 bp, Triticum aestivum
  Clone ID: uC-tsrow189045c12b1
tcgttcgtccaattgaaaatttcttttctttttgctctccttgatcgattgactgcctcacggacggtgcccatggccatggcatcgccgtcgtggtcatcttgctgcgcctccacctccacccgtcctctgcctagcccccccgcgagcagcaagagcaggaacccatggcgggcaagcagcggcaggaggagcgccagcggagggaagagacggcagcagctgtccatccgcgcggtggccgcaccgtcgtcggcggtggactactcggacaccgccgccggcgccggcgacgtcccctcgctgaaaatcaagctgctgagcgcggtcgccgggctgaaccgggg

SEQ ID NO: 8435 - DNA, 315 bp, Triticum aestivum
  Clone ID: uC-tsrow189045d01b1
atcgtctccacgcgtccgcccacgcgtccgcccacgcgttcgcccacgcgtccgggaaactggccatccgatatatggtttctgtttgccgatcaaatgatgtacgtgttcccttcggctcacaagatgatgctggcctgtctccaagcatcacagaaaggtaattgtgttggtaagctgatgatgcgcatgtgagcacatgcgtattgtactacttgatgtaccagtacattggtaggctaggacggtctttgccatgtcgggtgcgctcgccttggcaggccacgagacaataaaaagtatatttggtggtgt

SEQ ID NO: 8436 - DNA, 296 bp, Triticum aestivum
  Clone ID: uC-tsrow189045d02b1
atcgttgacgcgtgggcgccgcgatcgacgcgctgagcagcgccgcgagggaggagatgctcgatttggtggccgcctccacgcgattggcgcggcgggtgtgcggggtttacggcgcctggatgggccccgaggcggcaacgctgtggctggtctctgaacggcacacgccgggagtcccccccttgttgaatgagaggagcgacgaactggaaactgtggctcggattggagctgttggaatggaggtgtgtgaagcgctcatgggattgcacggcgaggggatggtgctgggt

SEQ ID NO: 8437 - DNA, 384 bp, Triticum aestivum
  Clone ID: uC-tsrow189045d03b1
ttcttcacgcgtccgcccacgcgtccggtcgcctcgggctcctcttcgccttcctcacccatgccagccgcaggtcctggcgcgagcaactctcccccggcgccaccctcctccgccgctacctccgtcggtgccacagcaggatttggcctcgtcgccctactggcggctggtctcatggcttgaacgcatatattgatcagctgccacgcgcacatatgagcttatatattgttaactactgctgtagtcattatcacgggtgaatacatgtattcttttttagagtgagaatgtgatagttacttgtatctatcacgtctatatgtaatctgcagaccttcatgtcttttatataatcattctagagcattattttatact

SEQ ID NO: 8438 - DNA, 355 bp, Triticum aestivum
  Clone ID: uC-tsrow189045d04b1
acctcaccaccgtcgtctcctctgctaagcattcggtcgtcaccgcccaccgtctcctctccgaatcttctgcggcaagtctttcaccgtcgacaacaaccagatggctcgcttcgccgtggtcgccgccctcctcgccctcctcgccgtcgccgccgccgcgcagggccccatgctggcgcccaggacggcccctcttccagcgccaccggcgaggtccccagccatcgcccctgcgccggtcgccaccccgcccaccgccgtgtcgtcgtccccgatggcatctacccctgccccgaccaccgacgctccctccgcgatgacgccgtccgcggtctctgccacacccgctgga

SEQ ID NO: 8439 - DNA, 378 bp, Triticum aestivum
  Clone ID: uC-tsrow189045d05b1
acctgcatgcagccgccgccagcagctgcgcaaagggtccacaaaccctaaccctagctccaagcttagcttccatcttctcgatctagctagagccatggcgccgaccaagggcgaggggccggccatcggcatcgacctcggcaccacctactcgtgcgtcggcgtgtggcagcacgaccgggtcgagatcatcgccaacgaccagggcaaccgcaccacgccctcgtacgtcgccttcaccgactcggagcgcctcatcggcgatgccgccaagaaccaggtcgccatgaaccccatcaacaccgtcttcgatgcgaagcgtcttatcggcagaaggtttgctgatgcctctgtccagagtgatattaagatgtg

SEQ ID NO: 8440 - DNA, 183 bp, Triticum aestivum
  Clone ID: uC-tsrow189045d08b1
cggacgcgtgggcggacgcgtggggcccagtttgttcaagctgcacagcataaaccccagcatcaaaaggctgcagaagctaaatctgtggctggggattcatcttcaatgccaagtgctggagataatgagagaaagaaatctgcatctgccaagtacccgagtgattcacagcagcattct

SEQ ID NO: 8441 - DNA, 328 bp, Triticum aestivum
  Clone ID: uC-tsrow189045d10b1
tcgtcgcccacgcgtccgccacgcgtccgctccccccaccgccgcgcgatcccatctgacgccgccccggccgacgacccccgcacgccggccgccatggcgcacggcgaccgcatgaccaccttcgaggagggcgagcgcgagagcgagtacggctacgtccgcaaggtctctggacccgtggtcgtggccgatggcatgggcggtgccgccatgtacgagctcgtccgtgtcggccacgacagcctcatcggggaaatcatccgtctcgagggcgattcagctacaatccaagtttacgaggaaacagctgggctaacggtcaacg

SEQ ID NO: 8442 - DNA, 318 bp, Triticum aestivum
  Clone ID: uC-tsrow189045d11b1
tgtcgtgattttctattgattgaagaggtagcaagtatggcttagaggcgaaattaggggagaggcgcctacggcggcggagatggctcccggcggcggagatggcctcggcggagcttgacgccgggagtgccttggagagggggagccgctgcccagagggagagcgcgttgttgaggggaggaattcggggaaccacatctcactactggatgtggacgacctcaaacgaagatggcttgccattacagagaaagctgggaagggagcaagtggtgcttcggcgaccgcaaaaagctgtagttggtaagatggat

SEQ ID NO: 8443 - DNA, 358 bp, Triticum aestivum
  Clone ID: uC-tsrow189045d12b1
tgttcgctccgatccaccaccaacacggctcgagctcttggcggaggaggaggtgtcggcagcttcgtcgtcgcggtcgccaggcagacgcaggcgcgggaagagaggcggagatgagacggccgctcggcgcatgcggcagcagatccagcccggccgctgctttcctcctggccgtcgccgcgatctgcgcccagttcgccacaggactagctgatgatgcatctaaagatgagtcaaaaggtcacactggccaaacagttttgtttgtcctgctaggaattggtgcagccggtctgttgtcattcttccttttcaagtattggcagaagaagaaaagagaggagcaacatgcacg

SEQ ID NO: 8444 - DNA, 320 bp, Triticum aestivum
  Clone ID: uC-tsrow189045e01b1
ttttaaaccctagcgatggcgttccgcggcgcagcctcccgctccttcctcgccgccgtccgcggtcgcaccgcttccactgccccgcgcgtacgcgcggcccccattcccgccgcccctccccgtcgcatccctgcctcggcgccctcctcccctctcgccgccgcaaggccattggcggcgttgatggggtcgccggcgctggttgccgcaaggctgacggggcactgcgcgtcgagcgcgcgggcgtgctgtgagctctcccagggtacttaaaggacgagttgctgcccttcgcaaggatacaacagttcttttgg

SEQ ID NO: 8445 - DNA, 317 bp, Triticum aestivum
  Clone ID: uC-tsrow189045e02b1
tcgttcctccccttccggttcgggttctggttcggttcgggtccgagagtagctagcctagtctagggtttccgtagttcggagaggagagaaagggagagatccatggcggagacggagtaccgctgcttcgtgggcggcctcgtctgggccaccgacgaccacaacctccagcaggccttcagccagtacggcgagatcctcgacgccaagatcatcaacgaccgcgagacgggcaggtcccgtggcttcggcttcgtcacgttcggcagcgaggagtcgatgcgccaggccatcgaggagatgaacggcaagga

SEQ ID NO: 8446 - DNA, 224 bp, Triticum aestivum
  Clone ID: uC-tsrow189045e03b1
atcgtccagcgagcgacgccaacgagagagagagaggagacagagctcaagcagcggagctacctacccaccccctcgaggccggagcggaggagatggagtcgccggagccggtgagcccgtcgtcgtcgtcgtcgtcgtcgggggaccgggagcagcagcagcgccacggggcggcggagcggccgtcggagacggcggcgctgcgggcgctggtggagcgg

SEQ ID NO: 8447 - DNA, 369 bp, Triticum aestivum
  Clone ID: uC-tsrow189045e06b1
acaaaacgcatgactcaaggggcatgatgcaattgtcgatgctttggccatcactagggactctgatgataaagaagccaacattcttggaccagctagtcaagctgcaagtgtcatcggaaaatctggttctgtcatcaagaggctgcgctcagtttcaaaatcattcattaaaggtaaaccaaaagatccaagtgacgttacacactcatgtgctatgagttttgataatttcgctcagataactggggacactagagctgtcaagaaggcattgatagcaggatcaacaattctctacaaatgggcatcgaaagagaacatttctcttgaaacatctattgatgaacatactccaaccattatact

SEQ ID NO: 8448 - DNA, 280 bp, Triticum aestivum
  Clone ID: uC-tsrow189045e08b1
taccggtttcttcctcgagtcaagtggctcttgattgatcccaccaccagccgcaccaccaacgtcttctgtccgtagctccttggtgcctagctgctgtgttcacatcacatctccatcgatgaagacgaagcaggcttccaaggccaaggcggcgccgtcgccggggaaggaggaggaagcagttgcaccgggtggtttccgcatggggccatggacggcgcaggaggacatgaagctggcgtggttcgtgcggctcttcggcgagcgccgctgggat

SEQ ID NO: 8449 - DNA, 290 bp, Triticum aestivum
  Clone ID: uC-tsrow189045e09b1
acgcccacgcgtccggcttcttccaccttgccgctctctgctccacttcatctgctgcgccccgcccatccatccttgaaacatcaagttgaccctctggctgggccacagcggttgcagagacaacaagtctcctccacaaaaggggtgagatgtcctcgctgaggccgctcaacacggaaccaagttttctccactccccgaagctgcagagcccgagggatgcctgcgccgcgccgctgaggtcgccgtcgccgagggtcgtcgtcggcccgccaaagaagaggatg

SEQ ID NO: 8450 - DNA, 308 bp, Triticum aestivum
  Clone ID: uC-tsrow189045e10b1
tgtttgcgacgtcactccatccaagttgaaccacacaccacactgccgtcgcgtcccgtgctcccaggtgagatcgagcgcgagtagccagccgatgagccgtctagtttcccggtggcacctcgacgacgacgcggtcctccgacgatcccccgccgggttcgctttcaggtggctgcacacgccggcatttgcgacggtgtcccccgtggagatctcaggttcaagcccggcggaagtgcagaattttgtgcagggaaaatggataaagtctgctaactggaactggatagtcgatcctttaaatg

SEQ ID NO: 8451 - DNA, 400 bp, Triticum aestivum
  Clone ID: uC-tsrow189045e11b1
tgttcgcccacgcgtccgcggacgcgtggcgagaatgctattttcaccatcccaccagagcttgcatatggtgaggatggctcccctccagtcatccctccaaatgcaacgctgcagtttgatgttgagcttctctcatgggcaagtgtcaaggacatttgcaaagatggcagcatctttaagaagatactagctgaaggcgagaagtgggagaatcccaaagactgtgatgaagtttttgttaaatatgaggcaaggcttgaggatgggactcttattacaaaatctgatggtattgagttcactgtcaaagaagggcatttctgccctgctatatcgaaggctgtcaagacaatgaagaagaatgagaaggccctccttactgtcaaaccacaatatg

SEQ ID NO: 8452 - DNA, 348 bp, Triticum aestivum
  Clone ID: uC-tsrow189045e12b1
tgtttcgagtgagcatgtgctagatgaggttgagaggtccttgcacgacgccctatgtgtgctttctcagacaggaaatgacacgcgtgtcatatttggcgggggatggcctgagatggtgatgtccaaagaggtggatgaacttgctcggtggacccctgggaagaaatctcatgctattgatgctttttcgcgtgccctgcaagccattccaacaatcatagctgacagtgctggtctggatagtgccgagctgatctcccagctccgagccgagcaccacagggagaacagcactgttggaatcgacgtcatcagcggcgggctgggagacatgcagaagcgtgg

SEQ ID NO: 8453 - DNA, 328 bp, Triticum aestivum
  Clone ID: uC-tsrow189045f01b1
tcgtttaatgtattgaatcttgcttttgacataaaacacaagtactgattttgagccccttctccaccacaggcaaagagaagacgaggccgaaccccaacaccaggaaggtatctgggcaccaaatcatcgcgtggaaggaggtattcccgaagcaggtcacctgttaggagagaccgttacagctcacgctactcgcctgagcgagaacgctcttattctccttatcgcagaggacgatcatactctcgtcgtgacaggcgtagatcatactcccctgatgaaaggaggcgatactactctccctatggcagaaggagatcatact

SEQ ID NO: 8454 - DNA, 275 bp, Triticum aestivum
  Clone ID: uC-tsrow189045f02b1
tctttcacgcgtccgcgcagacgcagctcgaccgaccacaactgtgcgcagcagcggcggccggcggagaccgtatcgtaccatggcgatggagggctacgaccgcgagttctggcagttcggcgaccagctccgcctccagacggccaccttctccggcctctccctcggcgactccatctggtcccccgtcgacgccgtccctcgcgcccgcaacgccgaccccggcctcttctccccctgccaggcggtccacaacaacgccggaaccggat

SEQ ID NO: 8455 - DNA, 369 bp, Triticum aestivum
  Clone ID: uC-tsrow189045f03b1
tcgtaatatcttgagaatagtagacatacttttatcgattatatttctgctgggtgtcaattgaatttgatggtagccatcgactacacagcttcaaatggaaaccctcggcttccagattccttgcattatattgacccctccggacggtcaaatgcgtatcaaagagtaatactggagattggagatatactacagtactatgacccagctaagcgtatcccctcttggggctatggggcaagacctattgacggtcctgtttcacactgtttcaacttaaatggcagcacttatcagcctgaggttgagggaatacagggaattatgtcagcttatatcagtgcgctacgcaatgtgtcattggct

SEQ ID NO: 8456 - DNA, 360 bp, Triticum aestivum
  Clone ID: uC-tsrow189045f04b1
tcgttcgtcctcctcctcccccgacgccgacgccgacgccagtcagccgccgatccggcgcgaaatcgagaggcagagccgccggagatccacgggggccgtggagggagccgaaccccgacgtccggcgccatgaacgcgaggggctaccgaagcaccagaactgctctctttgatggcattgaagaaggtggaatccgagcatcagcttattcttcacatgagatagatgaacatgagaatgagcgagctatggatggattgcaagatcgagtcagcattctcaagaggatatcaggtgatataaatgaagaggtggaggctcataaccggatgctggacagaatgggtaatgacatg

SEQ ID NO: 8457 - DNA, 148 bp, Triticum aestivum
  Clone ID: uC-tsrow189045f05b1
actgacacgcgtccgggggagggtactgggcaaaggtctccaccaccatgggcttggtgaccaaggctgcggccaagaagaaatgagatggtgtcaggttctttactgcatctatggtggcggtggcggtatttggtggtggtgatag

SEQ ID NO: 8458 - DNA, 241 bp, Triticum aestivum
  Clone ID: uC-tsrow189045f06b1
tggtactcgtcgcgcgctgtgtgcaaatcaccgccatctaccagatgtttgattgtctttgattgcctctctagacatgctgtgatggcatacagacactctctcaattgatcattctcccctcggaggatgtcaaattctttgtgtgtgtttcggagtgctggggaaggggcagaggctggggcaggggagacacgttctttctcaatgccttgatgcatgagggtggtgtacatggtca

SEQ ID NO: 8459 - DNA, 275 bp, Triticum aestivum
  Clone ID: uC-tsrow189045f07b1
ttgttcgcgccgtctactgagtcactcctcgctcctcactcaacggccagcatctctgtctcgctggaaagaaagccttcaacatggtggccaggaccagagaccagacagggaaggaggtgctgtgtgctctacctgtactgtaaaagattcatcccatggccgcggagtctgcctggtgctggccgtggctcagctccggcacggtgtggttcctcttcttcaacgtcttcgtcggcgccgtggccgtcctgtcctggcggcagggcagcgac

SEQ ID NO: 8460 - DNA, 120 bp, Triticum aestivum
  Clone ID: uC-tsrow189045f09b1
tgtgttcgccaacccgtccggggcccctggggcggattttggggggaccagggccaccaattttgggggtccttggttccagggaaaccaggttctggagggtaataaaatccatggggg

SEQ ID NO: 8461 - DNA, 384 bp, Triticum aestivum
  Clone ID: uC-tsrow189045f11b1
tcggtacaatgctggctcaaccgatttgggctgacaaattgcgtgggttcatgaattatagaggtaccgcaaaaattaggttgcaagtcaatgctacgcctttccaggctggtaggcttatcctagcatatattcctcaatatgttcatgagccaaggagttatactatccatttaacttccttaacaacaattactcaattgccccatgtggaaatgtccttgcaagacactgaggcggagctggtcataccatatatagctccaaccactcattatagtgccttgtctggtttctatgattggggtacagtcttttgttatgtttattccccattagcaactgggacgggtagcaatactgatcgctatactgcttggatga

SEQ ID NO: 8462 - DNA, 346 bp, Triticum aestivum
  Clone ID: uC-tsrow189045g01b1
gcgtccgaaaatgcaacatgacttgttgtttgatgttacaaccttacaggggcatcgactcaaatttgcaacgacgaattttataccatgcttgtgtagctcagtctgtggcgggcgaggcgtgggaggtgacgatgacgaatgatatggtggtcagcagataaaagaagccgttcatctccattgcccagttggggcctcttaggggactaatctagcattgggggttacaggaggagagacgctctcatggattaggatgttgcacatcattgacgggtcattccatggattaggatgttgcacatcatcgacgggtcattccatggattaggatgttgcacat

SEQ ID NO: 8463 - DNA, 271 bp, Triticum aestivum
  Clone ID: uC-tsrow189045g02b1
aatgccacgcgtccgccgcattcacatccacatccaaggatcaaacgcccgatcgaaaagcttctctccagcaagcagaggcaatcaggaagcctgcggcgatggcggtggggttccgtcgggcgctggacgcgctcacgtcgcccaagtcggccctgctggagtgcgcgcggcccaagaagctgtcctcctacgcgcgcgtccgctccatcagcctccccgtccgcctccacccgctggtggccgcgctgcacgactcggcgcgcgcgct

SEQ ID NO: 8464 - DNA, 327 bp, Triticum aestivum
  Clone ID: uC-tsrow189045g03b1
tcgttccgtcgccccgctgacctcaaccagccgccggtgaaatggcccctaagcgaggcggtaaggcgccggtcccggcgaagaagaaaacggagaaggtgaccaacccgctgttcgagaagaggacgaagcaattcggcatcggtggcgccctcccgcccaagaaggacctccaccgcttcgttaagtggcccatggttgtgcgcatccagcgccagcgccgcatcctcaagcagtgcctcaaggtgcccccggcactccaccagttcacccgcaccctcgacaagaaccttgcaacaaacttgttcaagatgcttcttaagtacc

SEQ ID NO: 8465 - DNA, 320 bp, Triticum aestivum
  Clone ID: uC-tsrow189045g04b1
atcgttgacgcgtgggcggacgcgtgggcgagggtgggacgtttgctttgtattcactactctgcaggcatgcaaagatgagcctgcttccaaaccagcaagcggcagatgaagagctgtcaacatattatcagcctggggttgatcggactgctatgtcctcaccattcaaaaggtttctagagaagcacaagaagctgcggacatgtttgcttctttttgttctgcttggagcatgcatggtgataggtgatggcgtccttacacccaccatctccgttttggcagccttgtctggattacaagaccgaggcacaggt

SEQ ID NO: 8466 - DNA, 347 bp, Triticum aestivum
  Clone ID: uC-tsrow189045g05b1
ttttatagcgtgcgacgaatctctgcccgatcgaatctccagggtgataacagggatggctaccggtagtgatgctggaaagtccgctgaggcagtgttggagtggcctaagcaggacaaaaagaggatgctgcatgctgtttaccgtgtgggagatctcgaccgcacaattaagtgttacacagaatgctttgggatgaagctgctgaggaaaagagatgtccccgaagagaagtacaccaatgcctttcttggatatggacctgaggatactaattttgcacttgagctgacttacaattatgggtgttgacaagtacgacattggagcgggctttggacatttt

SEQ ID NO: 8467 - DNA, 369 bp, Triticum aestivum
  Clone ID: uC-tsrow189045g06b1
tcgtctcgagcgccgagtacgccaggctcctggaggagatacgtcaggaggccagggagctcgtcctcatcgccgtcgccctcacggtcgtcaccctgccgctcgtcttcgccaagcagatcctcgccttctccgcggcctccacgacgtactccggcgaccgctactccctcgcggagctcctccgcagggtgaccaagtgggccaacctgaggggccctctcgtcaccgtgggctgtggtcaccgcgctccagctcacgttcatggcgctcctgggcgtctacctctccgccgtcatgcgccacgcgggggtgctctccgtgcaaggcgcggtcttcgtcctcgcctttctcgccttcatgtacttc

SEQ ID NO: 8468 - DNA, 342 bp, Triticum aestivum
  Clone ID: uC-tsrow189045g07b1
ttgttcgcggacgcgtgggcggacgcgtgggtgccgtgatgctgtgccttgagacatggtactttcaggtgcttgtgatcattgctggattgctccccaaccctgagattgccctggattccctctctgtgtgcatgacgatttatggttgggtgttcatgatctccgttgggttcaatgccgctgcaagtgtaagagtgagcaatgagcttggcgccggcaaccccaagtctgcatttttctctgtgtgggtcgtgaccgggctctctgcaacaatctctaccatccttgctgttgtgatcctctgcctccgcaaccacatcagctacttgttcacagatg

SEQ ID NO: 8469 - DNA, 209 bp, Triticum aestivum
  Clone ID: uC-tsrow189045g09b1
tcggcggcggacggagcaaagcagagcgactcatcgagcgcagccgccatggaccgtgtgcagttcgtgctcctgggcctgcccatactcctattctgctccgacgtagtcacgctcttcgcgccgtatccgtcggcgggccccaagtcccaccggcacccccagccggtctgcggcgccttccagcctggcgactcctaccgctacgc

SEQ ID NO: 8470 - DNA, 122 bp, Triticum aestivum
  Clone ID: uC-tsrow189045h01b1
tcggtgcctacctgatactgggaagaaagaaatttggtcacagacctgcaggtcaggtctttgcaacacacagttatgctgtccactgctggatcgaacttgactagcttattgctttaaaa

SEQ ID NO: 8471 - DNA, 215 bp, Triticum aestivum
  Clone ID: uC-tsrow189045h02b1
tcgtcttgagggtgacaacatgattgagaggttcaccaaccttgactggtacaagggcccaacccttcttgaggcgcttgacccatatcaacgagcccaagaggtcgtctgacaagcccctccgccttccccttcaggacgtttacaagattggtggcattggaactgtgccagttggtcgtgttgagactggtgtcatcaagcctggtatggtt

SEQ ID NO: 8472 - DNA, 278 bp, Triticum aestivum
  Clone ID: uC-tsrow189045h03b1
gcgtccgaaagacagtgtagctagtaagtgagactgtaagtgtcgagacatggagtactctcgccgcagcaggttgctcctggtgtgctcagttcttgtgctctgcctcgtaaccggagactcatggtgcaccaagttaagcagcaatttctatgactggacgtgccccggagtgtacaacgtggtccagcaacacgtgttttctgccatgagggaagagctgaggatgggggcctccctgctcaggctccatttacatgactgctttgtcaatgggt

SEQ ID NO: 8473 - DNA, 205 bp, Triticum aestivum
  Clone ID: uC-tsrow189045h04b1
tcttctttcagaagcgttgtatgttgcagagcagaaggcgagggaagcagtgcagatgcgctccaaggtgcagagggagctaatgctaaaggagaaggagaggaaggagcaagagttgagggcacttgcacagaaggcccgcatggaaaggtctggtgctccacctccatccacgggtatgcctgttggaggtgggagggagaga

SEQ ID NO: 8474 - DNA, 337 bp, Triticum aestivum
  Clone ID: uC-tsrow189045h07b1
ttcgtctgacaggccacctcaaccccgcttggcgatccgaacccaccgactcctcgtggccgacgacgccaccatggcggcgctcctagcccggcaggcagccctggccctccgcgctaggcagacggcgcgtctcggcccgtccgcgacggcgatgcagggccacctccggacctacatggacgcgggggcgcccaagaggttcaaagaggacgaggagaaagaacagcttgcgaaagagctcgccaaagactggagtgctgtgtttgaaaggagtatcaatacattgcttttgactgaaatggtccgtggtttgatgctgacgctcaagtacttc

SEQ ID NO: 8475 - DNA, 262 bp, Triticum aestivum
  Clone ID: uC-tsrow189045h08b1
tgtgttcgcccacgcgtccgtccacgcgttcggcttggtgacaaggctaagatcagcatttatgatcctcaggtgactgaggactaattccagcgtgaccttgcgtggaactaatttgtctgggaccaccctgttcatgtccagcccatgagccccacgactacaaaggaagtctcggctacgtgggatgcatatgcggctaccaaagatgcccatggcatctgcatcatgactgagtgggatgagttcaagactgtggact

SEQ ID NO: 8476 - DNA, 86 bp, Triticum aestivum
  Clone ID: uC-tsrow189045h12b1
actcacggggaaaggggaaggggaagcagtgtgtgtcggtgtcggcgagcaatggcggacaagccgagccgggcgctggtgctcta

SEQ ID NO: 8477 - DNA, 440 bp, Triticum aestivum
  Clone ID: uC-tsrow189047a02b1
gttctgctgtagcggatgcggctgtcggaccccaacggcgtgctccagagctgggatcccaccctcgtcaacccctgcacctggttccacgtcacctgcgacagcgccagccgcgtcgtccgcctggatttaggcaactccaacgtctccggctccatcggccccgagctcagccgccttgtgaatcttcagtacctggagctgtacaggaacaacctcaacggcgagatcccaaaagagttgggcaagctgaagaatttgatcagcttggatctgtatgccaataagctcaccggaagaatcctcaagtccctttccaagctcagctcactgagattcatgcgtttgaacaacaacaaacttgctggatcaattccacgggagctggccaaactcttcaacctgaaagtcattgatttgtctaacaatgacttatgtgg

SEQ ID NO: 8478 - DNA, 118 bp, Triticum aestivum
  Clone ID: uC-tsrow189047a03b1
ccatcgctgtccgggtgtctgtcttgtgccttctacatactgtcctaatgtaagcttcggtgaaacctggatgttatgagacttggttgtgtcttttaatactagtttgttgaatttt

SEQ ID NO: 8479 - DNA, 135 bp, Triticum aestivum
  Clone ID: uC-tsrow189047a06b1
ctttatttctgacatatacattactgggtgaagatgcgcccttggctgaggcttcttctgcaaaggggctgaaatttgtaactgttttgatcagcattggagctgtcgctggtcttactacaacacttcttgttg

SEQ ID NO: 8480 - DNA, 453 bp, Triticum aestivum
  Clone ID: uC-tsrow189047a07b1
tcgcttcgcgtccgaacgagagcagcgagatcatccggatgctcaacgccgagttcaacgacatcgcggagaaccccgggctggacctcaacccggcgcacctccaggtctccatcgacgaggtcaacggcctggtctacgacgccatcaacaacggcgtctacaagtgcggcttcgccaagaagcaggggccatacgacgaggccgtcacgacgctgtacgaggctctggacaagtgcgaggagatcctgggcaagcagcggtacatgtgcggcaaccagctcacggaggccgacgtccgcctcttcgtcacgctcataagatttgacgaggtttacgccgttcacttcaagtgcaacatgaagctcctgagagagtaccctaacctgttcaactacaccaaggacatctaccagatccccgggatcaacagcacggtgaacatggagcaca

SEQ ID NO: 8481 - DNA, 319 bp, Triticum aestivum
  Clone ID: uC-tsrow189047a08b1
tcgcctacgcgtccgcccacgcgttcggtcagtggatggctactatggcaactgcgtgtacccggtggggatcacccggagcagcaagaccatccgggaggcggcgctgcccgaagtggtcggcgtgatgcgagaggccaaggaggcgcttaaggtgaggttcacggactggatgcacggtggcgccaaggacgaccactacaatgtgccgctggattacggcaccgtgacggtgtcggactggagccgcgtcggcttcaacgaggtggactatggcttcggtgagcccggatacgtgttcacgctcaacgacgacgtt

SEQ ID NO: 8482 - DNA, 400 bp, Triticum aestivum
  Clone ID: uC-tsrow189047a09b1
tcgcctacgcgtccgcccacgcgtccgcccacgcgtccgctcgaagtggtcatacagtgactagagcaggccctgttttaattctttttgggggcgaggataccaaagggaagaaactacatgaccttcatatgtttgatctgaagtccttaacatggcttcctttgaactataaaggtgctggaccttctccaagatccaatcatgttgctgcactttacgatgacagaattcttttgatttttggaggcgaatcaaaatccaagaccttgaatgatgtccatgctctagattttgaaacaatgttatggtcaagaatgagaacacatggtcatcatccatcacctcgggcaggttgctgtggagctctctgtgggacgaaatggtatatagcaggggg

SEQ ID NO: 8483 - DNA, 481 bp, Triticum aestivum
  Clone ID: uC-tsrow189047a10b1
tcggtatcggacgaggggcgcgtggatggcttcagcggcggtgaccgttctcagggcatgcgagagctagcgcaggcgatacggcgccttggtgaggcctacgagcgcgtggagacagcgaagctggagcaggccgccgagatggagcgccagcgtctggacttcgcacgggagcttgagtcgcaacgcgtgcagttcttcctcaatacgcagaaggagctctcacagggcaagagccacatctctcccgctgcggctgcctcccactcccaggtaggtgccgccactgttggtggctcatctaggaggatggcgtccgtaccagattccacatcgagaagaatggcaccgtttcctgatgcccggacgagcagcaatcaccatgaccggtaccgtgccagcgacggtagcagacaccatcaccgccctgccctgcgtccgcattatcagtaccatgagaacaatatggcagactctgcag

SEQ ID NO: 8484 - DNA, 334 bp, Triticum aestivum
  Clone ID: uC-tsrow189047a11b1
tcgcttctcctctcccccagaaacgcccccgccgccgactcaatccgccctgctccgcccgcgactcagcccgccctgctatgcccgcgtctccagtctactttgcccgtggcgacctcgtgccgatctggccgccccgcggtcgggcacgatctggaggaccaacaggcggtggtgcacggtctgggcggcggcgacctgcgcggcccaggtgctgcaccgatgcctccttcctccgtcgcccaggtccaaggcggctctcttctagccaaccaccagccatgcgtcgccccctcctccttggccgactctctcctcctctagagaagtagca

SEQ ID NO: 8485 - DNA, 332 bp, Triticum aestivum
  Clone ID: uC-tsrow189047a12b1
tcgattccaaggtgacgctcccgaccgtctgcaattacaccattcatgacgccgaggacgccgaggacgccaagcaacaaggctcgagcttgagcaacgtcgtccaggaacagcaggagcagcagcagcaggggagcaggccgctgtgcgacttctccaactttcgggcgaacgtgtgcgagatgcgcggcgacgtgagggtgcacccgaaggccacctcggtgctcttcatggagcccgaggggtcgcagcgggacgaggtgtggaagatcaagccctacccgcggaagggcgacgagttctgcctcagccacatcacggagctgacggtc

SEQ ID NO: 8486 - DNA, 175 bp, Triticum aestivum
  Clone ID: uC-tsrow189047b01b1
cattcaatatcccctgaattcatcaagatgaacccccttgggaaggttcctgttcttgagactcctgatggtgctgtttttgagagcaatgctattgcacgctatgttgctcgctcaaagggtgacaacctgctttggggtggttctctcattgaatatgcacgtgttgagcaat

SEQ ID NO: 8487 - DNA, 165 bp, Triticum aestivum
  Clone ID: uC-tsrow189047b02b1
cctcgcgttcgccacgcgtccgcggacgcgtgggtttcggtttcccccattccccttcgcacccccgcggcggcggagccttcccgggcgctcaccggacacgcgcaaaaacactatgaggaggtacagcccttcacaccgtagtcccccgaggaggggatatgg

SEQ ID NO: 8488 - DNA, 302 bp, Triticum aestivum
  Clone ID: uC-tsrow189047b03b1
cctatcgtgtccgcccacgcgtccggcagagccaccaaaggcagcgcagcgctagcgtcttggccgggtccatttcttcgacagaccaaccaaacgctctcgcaggacacgcacggccgcaccgcatgtcgtggtctgacacggacgcggcgctcttcgcggccgtcctgggccacgacgccgcgcgccacctggccaccacgccgccgcacctcgacggcccggcctcgtcgtcgcccgagctgcaggcgcgcctgtacgacctcgtcgagcggggaggagcctggacctacggtatctac

SEQ ID NO: 8489 - DNA, 119 bp, Triticum aestivum
  Clone ID: uC-tsrow189047b04b1
gttagggttcggtcaagatgaggaagctcgacgcgctgaccgccaaggcggcgcccgtgctgtcctcgcccgagcgctccgtctcgtccacgctcaccgagtcgacgtccacggcctcg

SEQ ID NO: 8490 - DNA, 426 bp, Triticum aestivum
  Clone ID: uC-tsrow189047b05b1
cttaatttggggaacacgtgactctggattaatatcccctattgaagatcccatggcaattatgcagaaaggctattctattactatactgcttgctgttcttacctttggagggtctactcgttggctcctgtacactgaacaagcacctactgcatggttcaattttgccttgtgtggcttggtgggcatcatcacagcatatgcttttgtttggatttccaagtattatacagattataagcatgagcctgtccgccttttagctctttcaagttccacaggacatggaactaatattattgctggagtaagtttgggaatggaagcaacagccttaccagttctagtgatatctatagccattatatcagcattttggttgggacgtacctgtggcttggtagacgagcttggcaatccaac

SEQ ID NO: 8491 - DNA, 243 bp, Triticum aestivum
  Clone ID: uC-tsrow189047b07b1
ttgctgtcgcgtggggcgccttcccacaccgtgcccttactgatctgggtcgccggcatgggccagtgatgctcctcaagctaggcgaggtccccctcgtggtgatctccagcgccgaggcggtggcccaggtgttcaaggcgaatgatgtcgccctgtcgaaccatagtagctccaggttgcaggacattcgtgggcttcggcggtaagggcatcttgatcgccccctatggtgagcacttg

SEQ ID NO: 8492 - DNA, 470 bp, Triticum aestivum
  Clone ID: uC-tsrow189047b08b1
ttgcttatcgcgtccgcttcgattatattgaggaagacaggttaaagatatacgagttgcttactggtaacatacaaggcgctttacttgattcaccaatcgactggaaaaggtaccttggtttaatcatgtggtatcagttgtcaccagatacatcacttgatattatcattcggtgttatcaccaactacttggtgagggcaaagttccaaatcctgttcctgtatacatcgatgaaggacctctcgaggaagcacttcagtggtccccaggtgaccggtttgacatatctttttatttaatgcttcttcatgcaaaccaagatgagaagtttgggcttctaaagactatgttcagtgcattctcgtcatcgtatgatcccatggactaccatatgatctggcatcaacgatctattctcgaagctattggtgctttcagtacaaatgatcttcatgtactggatttg

SEQ ID NO: 8493 - DNA, 248 bp, Triticum aestivum
  Clone ID: uC-tsrow189047b09b1
tcgactcctttgtcgtcggcctagagggctcgcctgatctcaaggccgcgagagaggtggctgactatcttggaaccatccatcacgagttccacttcaccgtccaggatggcatcgacgccatcgaggaggtgatctaccacaacgagacgtacgacgtgacgaccatacgcgcgagcacgccgatgttcctgatggcgcgcaagatcaaggcgctcggggttaagatggtgctgtctggggaaggc

SEQ ID NO: 8494 - DNA, 365 bp, Triticum aestivum
  Clone ID: uC-tsrow189047b11b1
aagccacggcgccgcaccgacagctcggaggagagcgttgggggcggcggcggcggcggcggcgatggggctgctgtcgaaccgggtggagcggtcggaggtcaggcccggcgaccacatctacacctggagggccgtctacgcctactcccaccacggtatttatgttggaggaagcaaagtggtccattttacacgaaagaaggaagttgaatcttcggattcatccaactccatctctggcctgatctcacgggcttcatcagagtgcccaacattcccagactgtggttttcagctggccgatagtggcgtcgtactcacctgcttggattgctttcttgcgaatggctccctctactgct

SEQ ID NO: 8495 - DNA, 341 bp, Triticum aestivum
  Clone ID: uC-tsrow189047b12b1
tcgcctcacgcgtccgctcgcggtggccctggccaagtacacagcggatatttccgcgaagttcgccgccgagaggggcgccgtcaccgtcgtgctctccggcggatccctcatctacgccctcaggaagctgacggaggcgccgtacctggagacggttgactggagcacgtggcatgtgtactgggtagacgagagggtcgtgcccaaggaccacgaggatagcaactacaagctcgccctggatgggttcctctccaaggtaccaattcctgctggtcaagtgtatgctatcaatgatgccttgtctgctgagggagcagcagaggactatgaaacta

SEQ ID NO: 8496 - DNA, 153 bp, Triticum aestivum
  Clone ID: uC-tsrow189047c02b1
ccctcgctgccgctcctacccaagctgtaaagcaccaccgtggtacacctacgcggtgtgtgcgtgtgtgtcgtctctgttcggtcgctccggcgagatgaagctcccgctgtcggcggggtcgcccgacgcggcgccggagatggccaagcc

SEQ ID NO: 8497 - DNA, 292 bp, Triticum aestivum
  Clone ID: uC-tsrow189047c03b1
ccctcgctgccgctcttaaaccccagcccccactccccattccccattcccccctcccccgccgtctcgtcccagctcgccctccagaggttttagtcttcctccatggcggccctcatcaagctctggagccttcttaggcagagtgctgtggctagcagtgcctccaccggctcggctcctgccctgttcaacgctgcccgcttcatgtgcgccggccagcctgctgatggctccaagctttttcgtggtggtctcgcctgggctactgatgatcattcgctgaaggagg

SEQ ID NO: 8498 - DNA, 378 bp, Triticum aestivum
  Clone ID: uC-tsrow189047c04b1
gtttatgtcatccctttcattagtctgttattcttatcatctgctttcctaaccacgaaactgagactatgtattttatttgtcctttttacacacccttattgtgttattcactcccttttagttgttgatttatttgaaatgtattgcttgccagcttttgcattgtcattatcttgaaatcatcttaaatgtgtgtgtgaactgctaacttggttcttcctctcggatgtgattccttagacctttcatcatcatattcatttcattgtatattgcaagacttggattcaaatgttgaatttgttattcgattgttcttgttctggcattttgattgaaaaactggaatcctttgaaaacatccacccaagccca

SEQ ID NO: 8499 - DNA, 320 bp, Triticum aestivum
  Clone ID: uC-tsrow189047c05b1
gggattgtcccgtggttccagcacgcgctgccggacccctgcctcttcgagcaggcgcacggcgaggcgctgtgggagatgtccgggcacgacgcggcgctggacgcgctgatcaacagcgccatggtctcggacagccgcttcatcgtggacatcgccgtcagggagagcggcgacgttttccgggggataagctccctggtcgacgtgggcggtggcctcggcgcggcggcccaagtcatctcggaggcgttcccgcacctgcagtgcagcgtgctggagctcgagcacgtcgtcagcaaggcgcccgccggcacctg

SEQ ID NO: 8500 - DNA, 86 bp, Triticum aestivum
  Clone ID: uC-tsrow189047c06b1
catcactagcggtccatcgccgactacttccctccccaccttctcaagaaggtggtgtcggaggtggtgaccacgttcctgctggt

SEQ ID NO: 8501 - DNA, 450 bp, Triticum aestivum
  Clone ID: uC-tsrow189047c08b1
tcggttataacttcttttacttccgcgcggcgatctccactcccgtccaaacccatccaactcaccgcccaaggtcgccgcggatccagtagcctcgtcggagcggagatgaagatcacggcgctcgtcgtgctgaagccgtcggcgggaggcgccgggggctcctcctccagcggcgggcagggctcggaggcgctcgtgctggccaacgccacggacgtcagccacttcggcttcttccagcgcggcgccgcccgcgagttcatcgtcttcgtcgcccgcaccgtcgcccagcgcacccagcccggccagcgccagtccgtccagcacgaagaatacaaggttcactcacacaacagaaatggcctctgcgtggtggcattcatggatgatcactatcctgtacgaagtgcattttctcttctgaataaggtacttgacgaataccag

SEQ ID NO: 8502 - DNA, 348 bp, Triticum aestivum
  Clone ID: uC-tsrow189047c09b1
tcgggctattctgtcacatactccagatttgggacaaggtggctccactgccgtaactgccatccttataaacggcagtaagttgtgggtagctaatgttggggattcgcgagctgttcttctgaaaggaggtgaggccatacagatgtcaattgaccacgacccgaatgctgagcgcggcgctattgaaaataagggtggttttgtttcaaatatgccaggagatgttcccagagtctgtggacagttggccgtgtccagagcgtttggggacaggaatctaaaatcacttttgaaatcagagcctgatgtgaaagttgatgatatcgatcacactgctgagctagt

SEQ ID NO: 8503 - DNA, 425 bp, Triticum aestivum
  Clone ID: uC-tsrow189047c10b1
ttcgttttcagatgctcagcttcaccctcgccatcaccattgtcggtgttcccgtcggtcttcctgccgtcgtcaccaccaccatggctgtcggtgctgcctacctcgccaagaagaaggctatcgtccagaagctgtctgccattgagtcgcttgctggtgtcgagattctctgctctgacaagaccggtaccttgaccaagaacaagctctctcttgctgagccttactgtgttgccggtgtcgaccctgaggacctcatgctcactgcctgccttgctgcctcccgcaagaagaagggtattgatgccatcgacaaggccttcctcaagtctctccgcttctacccccgcgccaagtctgttctgtccaagtacgccgtcaaggagttcttccccttcgaccccgtctccaagaaggtcact

SEQ ID NO: 8504 - DNA, 261 bp, Triticum aestivum
  Clone ID: uC-tsrow189047c12b1
tcggttaagttcaacaagctgctactcccaaacccatttgacaggcctcgttctgttttcttgatgcaacttgatggatcccatgactatgttgattgcttcatatctgatgccggcagtatttacaaaaccaagattgatggtgcaaaaagtgctgctatagagcttacagataaggatgaattgattgtcattcgttcggatgaatcttctggattagatgttcttgataacgaactcgccaacttggcaacctggttg

SEQ ID NO: 8505 - DNA, 254 bp, Triticum aestivum
  Clone ID: uC-tsrow189047d01b1
cctatcctcccagttctgttcctcggccattctagccaccatgccgggctccatcgccttcggtcgcttcgatgactccttcagcttggcctctttcaaggcctacatcgctgagttcatctccaccctcatcttcgtcttcgccggcgtcggctctgccatcgcctacactaaggtgagcggcggcgcgccccttgacccatccgggctgattgccgtggcgatatgccacgggttcgggctgttcgtcgcgg

SEQ ID NO: 8506 - DNA, 385 bp, Triticum aestivum
  Clone ID: uC-tsrow189047d02b1
cttttgattaatctattgatctgtctatggacaggcaggcatctatttggtttgacgctggtgttcaaccgttagttactactgtaccagcaaggccgcaaatataattttatgcattctaaaaatatatcatctagttcgagagctaggataaaatataccaacactgtagtttgttggttctttttgtgtgtggatcatctatgttgtgcgtttgcattttgagcttgatgcagtctatgttacagtcctgcaaattgaagcatacaaactactccctccgcttttgtttactccattattagttttgaccctagtccaactttataaagattgaccaagtttatagaaaatgatattaaatttcacaataactaatatatat

SEQ ID NO: 8507 - DNA, 111 bp, Triticum aestivum
  Clone ID: uC-tsrow189047d03b1
cttttctttcggttcgggttctggttcggttcgggtccgagagtagctagcctagtctagggtttccgtagttcggagaggagagaaagggagagatccatggcggagacg

SEQ ID NO: 8508 - DNA, 211 bp, Triticum aestivum
  Clone ID: uC-tsrow189047d04b1
cctcgcgtccggtgaagccctgctcccgcgcctactcccacgactggaccgagtgccccttcgtgcaccccggcgagaacgcgcgccgccgcgacccgcgccgctactcctacagctgcgtgccctgcccggagttccgcaagggcgggtcgtgccgtaagggcgacggctgcgagtacgcgcacggcgtcttcgagtgctggctccaccc

SEQ ID NO: 8509 - DNA, 293 bp, Triticum aestivum
  Clone ID: uC-tsrow189047d05b1
ctttctttcccccgaccgccgccgccgccgccgcctcctcctctcggttccctctccttccttcgagagcttcagccatgggtaaggagaagactcacatcaacatcgtggtcattggccacgtcgactctggcaagtcgacgaccactggccacctgatctataagcttggaggcattgacaagcgtgtgatcgagaggttcgagaaggaagccgctgaaatgaacaagaggtctttcaagtacgcctgggtgcttgacaagctcaaggtcgagcgtgagaggggtatcacc

SEQ ID NO: 8510 - DNA, 127 bp, Triticum aestivum
  Clone ID: uC-tsrow189047d06b1
actatgcttcgcgcagggatggctcgccaaggtatggtcacggcgctgttgctggtggtcctcgccgccggctgctgcgcgtcggcgggcgccgtggcgtacctctccaagctgccggtgaccctcg

SEQ ID NO: 8511 - DNA, 216 bp, Triticum aestivum
  Clone ID: uC-tsrow189047d07b1
tctggatgatccttgccggataaaatgtaaagagtcccagcctttttgttatttgcttgcaggaagtgctgtttgttaaatttgaaaacgtgtgcgaatagtagctactagggaatctagaccagatggtattctggcatcacttgtgccttgcatttttatgcaatacttagccataaataaatggacgccacttcatattccttgaaccatttc

SEQ ID NO: 8512 - DNA, 234 bp, Triticum aestivum
  Clone ID: uC-tsrow189047d08b1
ttgtttattcgaactgacgggccgaccagccagccaccccactgcactagctttcctaggagctagtagtcccatggccatggccagatgcctcttgctgctagccatcgtgtcccttgccgccgcggaaggcggcggaaacaactccaccgactctgccgggcaggtccgcctgagctgcggcgcgtccgccccggccaccgactccgacggccgtgcgtgggaaggtgactc

SEQ ID NO: 8513 - DNA, 393 bp, Triticum aestivum
  Clone ID: uC-tsrow189047d09b1
tctgcttacgcgtccgacatgattgagaggtccaccaaccttgactggtacaagggccccacccttctcgaggccctggaccagatcaatgagcccaagaggccctcagacaagcccctccgtcttccccttcaggacgtgtacaagattggcggcattggaactgtgccagtgggccgtgttgagactggagtcatcaagccaggcatggttgtcacctttggtcctactggcctgaccactgaggtgaagtccgctgagatgcaccatgagtctctcctggaggcgcttcctggtgacaacgtcggcttcaacgtcaagaacgtggctgtcaaggatctcaagcgtgggtacgtcgcttccaactccaaggacgaccctgccaaggaggct

SEQ ID NO: 8514 - DNA, 327 bp, Triticum aestivum
  Clone ID: uC-tsrow189047d10b1
acgcgtgggcggacgcgtgggcgcgggcaagaagcctaaggccgtgaagcggctgccggcgggcaagacggcgtccaaggaggccggcggcgagggcaagacccggggccgcatgaagggcagcaaggcgaagaagggcgtggagacgtacaagatctacatcttcaaggtgctgaagcaggtgcaccctgacatcggcatctcctccaaggccatgtccatcatgaactccttcatcaacgacatcttcgagaagctcgccggggagttcgccaagctggtccgctacaacaagaagcccaccatcaccttccgggagatccagac

SEQ ID NO: 8515 - DNA, 287 bp, Triticum aestivum
  Clone ID: uC-tsrow189047d11b1
tcggtttccgccagcagctgcgcaaaggctccacaaaccctaaccctagctccaagcttagcttccatcttctcgatctagctagagccatggcgccgaccaagggcgaggggccggccatcggcatcgacctcggcaccacctactcgtgcgtcggcgtgtggcagcacgaccgggtcgagatcatcgccaacgaccagggcaaccgcaccacgccctcgtacgtcgccttcaccgactcggagcgcctcatcggcgatgccgccaagaaccaggtcgccatgaac

SEQ ID NO: 8516 - DNA, 157 bp, Triticum aestivum
  Clone ID: uC-tsrow189047e01b1
gcccacgcgtccgccacgcgtgcgcacaaacccattcaattcagttcctctctcacaatgaatttcgtacagatatacacccacattagagttagactcttcgggcttagttcgattgattttactgacatggcttcctcgcgtgccattatgatgc

SEQ ID NO: 8517 - DNA, 347 bp, Triticum aestivum
  Clone ID: uC-tsrow189047e02b1
cctcgcgttcgcccacgcgtccgctcattccttcctaccacccccggcaccaccagcccaagcagagccatggcgcccagcggagacaacaccgtggccaacgtccacagcggcatcgacagcaccaacaagacgctgctcaagagcgacgccctctacacctacatcctcgacaccaccgtgttcccccgcgagcacgagtgcatgcgcgacctgcgcctcatcacggacaagcacccatggggctacatgcagtcgtcctcggacgaggcgcagctgctggggatgctgatcaagatggcgggcgccaagaagacgatcgaggtgggcgtgttcacgggctactc

SEQ ID NO: 8518 - DNA, 346 bp, Triticum aestivum
  Clone ID: uC-tsrow189047e03b1
cttattttggctagtgatgggctgtgggatgtggttccaaatgaggacacgccgtctcgctcgttaagatggaggaggaccccgaggcggcagcccggaagctgacggagactgctttcggccgtgggagcggcgacaacatcacctgcgtcgttgtcaagttccagcacagcaagacgggcggtggtgactcccctcccatctctcccccgggcaatcaaatttgattgctactattcgtccgctatacatgttgttgttagcctttaaatttacagcagctggatggatgttttctctgttgaatgagttgtatgtacattggcggctggtactagatggcgac

SEQ ID NO: 8519 - DNA, 386 bp, Triticum aestivum
  Clone ID: uC-tsrow189047e04b1
tattgattaaaattgacctattgctagaggaaggcaggaatagagaggagcagcttcaagaggaggagatgaagattatcaaagctcagacagagatctttatcttaaaagagagtttgcgcgacatgtctgaagcgaattcggactactcggcaaaactgcagaagaaggaagaagcatgcaaggttcatgaggagaaattgggctgcttgtcacaggataatcagaagctaactgaagggatcggttcattacggaaagtattgcacttggatgagaagtacgagtccctggaccaaatgaagcttgacatcattttgcagctcatgttgcatgaggtcaactgcttaaggagtacaatatctgatgcccaggatgcgagacag

SEQ ID NO: 8520 - DNA, 247 bp, Triticum aestivum
  Clone ID: uC-tsrow189047e05b1
ctttcattcaatcgagccaaccaagccacgccgctcaatcccgcaggagcccgaggcctccacgctggagccacgagcgccaccgccaccatttggagcgccgccgttgccggagatgagtgccccgctgccccatgcttcttctccctctcctctcattcgtttctcttggctctctagctctctgcctctcaagtctccctattatctccccgtgtaggagccgtggaagccatggactgaattc

SEQ ID NO: 8521 - DNA, 427 bp, Triticum aestivum
  Clone ID: uC-tsrow189047e07b1
tcgcttgaacagtggttgcaatacaagatgagagatcacagcatcagaacaaggccaaggctctcaaagttctccgggcaagactatatgaattggaaaggcataggctccatacagaccggtcgaagctccgatcagagcagattggaagtggtgacaggtccgagcgcatcagaacatacaacttcccacaagggcgtgtcactgaccatcgtgtcggggtcacgcaccactccatagtggacgtcatggagggagagagcctggacgtcttcatcgaagcgctgctgctgcaagaagagatggatgcaattgcttcgtttgcttcgtgagccctaatttttgtggatttcttcctggagcgacaaaccgcatcataaacacactgaacactgaaccaacatagaggagaaactctaggattatg

SEQ ID NO: 8522 - DNA, 371 bp, Triticum aestivum
  Clone ID: uC-tsrow189047e08b1
tcgtcttctagctaacatacaggcaggccatcaggaggagccacgaggaagaaacaaccagcgcatatatccccctcgccccctccctcccgccggcagagctgagctgagctgagccaccgttcgaccaactcgcctctagaacacagagccccccgccgcccggatcccttcttcatccccctctccgctctttgtatcgctcaccaccgccatggctaagcagcagaagaacgcgcacgtcccgaagttcggcaactgggacaacgacggcaacgtcccctacacgctctacttcgacaacgcgcgcaagggcaagggcggcaagcccatcaaccccaacgaccccgtcgagaaccccgaggccttct

SEQ ID NO: 8523 - DNA, 366 bp, Triticum aestivum
  Clone ID: uC-tsrow189047e09b1
ggttaaggagcaggcggcggcggtgcccgaagaggagaagcacggcgacctagcccgagctcgcaaccatggctaggggtttgaagaagcatctgaagaggctcaatgccccgtctcactggatgcttgacaagcttggtggagcttttgcccccaagccatcatctggtcctcacaaggccagggagtgcctgcctctgatcctcatcctgaggaacagactgaaatatgctctcacctaccgtgaagtgcaatctatccttatgcagcgtcatatcatggctgatggaaaggtccgcactgacaagacctaccctgctgggttcatggacatcatttccattcccaagactggtgagaactaca

SEQ ID NO: 8524 - DNA, 284 bp, Triticum aestivum
  Clone ID: uC-tsrow189047e10b1
tcggttaggcaatctccgctatggcatggggaactgcatcatgcccaaaggttgagaaaatatttggtcccggcaaccagtatgtcacagctgctaaaatgattcttcagaacagcgaagctatggtctctatagacatgcctgctggcccttcagaagttctggtaattgctgacaagtatgccaacccagttcatgttgccgctgatctgctatctcaggcagaacatggcccagatagtcaggttgttctagttattgcgggagatggtgttgatttaggt

SEQ ID NO: 8525 - DNA, 137 bp, Triticum aestivum
  Clone ID: uC-tsrow189047e12b1
tcgcccacgcgtccgttttccccttctttctccctccggtccggtggatctccagccacccaggcccgagccatgggcggagacggcgacttcaacgccgcaggcggcggaaggggggttgcgggtcggaggcgtgg

SEQ ID NO: 8526 - DNA, 126 bp, Triticum aestivum
  Clone ID: uC-tsrow189047f01b1
cggtcgctcggggtcgaaatagccggtgatgcgtgtttacatgggtgatactttctgccatgtaaattgaaatatgtctcatgatgtttctttattagttgctgcatagttatactgaattgcatt

SEQ ID NO: 8527 - DNA, 144 bp, Triticum aestivum
  Clone ID: uC-tsrow189047f02b1
cttatcgcttgggcggacgcgtggggcatcatcctctgtaatgagtaaacagagcacttctgttttgagcaatatggggctctcagaggtttcttctgctttaacatgatttggcgacctcgacgatgggtagcttttcctata

SEQ ID NO: 8528 - DNA, 192 bp, Triticum aestivum
  Clone ID: uC-tsrow189047f03b1
cctacgtgtccgtcgaaaaggagttaaatgatctgtattaccagctttgtcatgaaaggaatgaacggctacttgcccaaaataacccaggaggcttgccatctgcgtcctcagatgaccgctcgctgtcaacttgcatgtgtacatgggaagaacacatatcatcattgagggatttgaagtttggaggat

SEQ ID NO: 8529 - DNA, 174 bp, Triticum aestivum
  Clone ID: uC-tsrow189047f04b1
aaatcctaggacccgatggcctagccaccattcccacacacagcccgcccgccggcgccggcatgccgccgttccggcgctgggcggatctgccggcggacctcctctgccggatcggcgacagactggacctcaagtgctacgccagcgcgcggggcgcctgcacggtctggc

SEQ ID NO: 8530 - DNA, 178 bp, Triticum aestivum
  Clone ID: uC-tsrow189047f05b1
cctcgtttccgctctcccctgctctcctccacccctcccatggccgcccccagttcctgggcctccccgttccacgaaaagagagcttagcgctaccaagccctccgttctttccagttctcggctgctttctccgtcccggtcatcaatcttcgtcgagcagagagaggaaggaggt

SEQ ID NO: 8531 - DNA, 275 bp, Triticum aestivum
  Clone ID: uC-tsrow189047f06b1
ctttaattatagtcatggctgctattggaggaaacactgctggtccaggtgatgctgttcttaatgtgtacataaaccatgacaagaaattcgcttttgtggagatgaggtctgtggaggaagcaagcaatgcaatggcactggatggcattttatttgaaggtgcaccagtgaaggttagaagaccaacagactataacccttctctggcagctgccctgggcccaagccagccaagctccaatttgaatcttgctgcggttggcctaacacca

SEQ ID NO: 8532 - DNA, 290 bp, Triticum aestivum
  Clone ID: uC-tsrow189047f07b1
tcgcttatcgcgtgggtccaaacttcaatcgaatctcaaggtgaagatttgccagacaccatgaaagagcaactgaaagcaagcaggattaagatcttggctgccttcctggtcttcgccatggttactcaaggcttcgcgattcgtgtcaaggggacagtgaggaatgacatgacagatgaggctatcagcacgaaaaccaccctcggtgcaggcagcagcacaacggtggacaaccaccatgcaatcccacgggatcagtatagtagccatggaggagaggacggatc

SEQ ID NO: 8533 - DNA, 163 bp, Triticum aestivum
  Clone ID: uC-tsrow189047f08b1
tcgggtggaggacgtgcggctgggcgcgaaccgctactcggagcaccagcccatcggcacggcggcgcagggcggcggcgcggacgagaaggactacaaggagccgcccccggcccccttcttcgaggccggggagctcacctcctggtccttctaccgggcg

SEQ ID NO: 8534 - DNA, 431 bp, Triticum aestivum
  Clone ID: uC-tsrow189047f09b1
tctgctttgttctgcttgggcggcgtcttctgaggcgcaggcttttctccccctccgctctaccccggcggccgattcgcgcccccctcgctcgaccctccaggtcagggaggcttctctcctaggagaggatcaatgtccaattatcacgacgatcacgtcgaagacatggaggatgattatgacatggacgaccccgctgaggacatggttgacgcccaccacgagcgaggtttaagagactccgattcggaggatgacgagtatgcccattcgaatgataagatcccagatacttcggcagcggatgcaagaaaagggaaagacatccaaggaataccatgggagaggctagctatcacatgggaaaactacagacagaccagattagagcagtacaaaaactatgagaacattcctaattctggaga

SEQ ID NO: 8535 - DNA, 359 bp, Triticum aestivum
  unsure (1)..(359): unsure at all n locations
  Clone ID: uC-tsrow189047f10b1
tcgcaaaccttgattcgacatggcgaagtcgcccatggcgatcttggctctcgggctagcagcactagtcctatccggcgccgggctggtggccgcgcagaactgcggctgccagccgaacgagtgctgcagcaagtacggttattgcgggaccgatgccagctactgcggacaagattgtcggtcgggcccgtgcacggcgagcggcggcgggagcggcgatcccgtggagagcgtcgtcaccgacgcgttctttgacgggatcaagtcccaggccgccgacgggtgccccgggaagagcttttacacgcgccagttnttcctggacggcgcccaggcgaaccccgacttcggcaaag

SEQ ID NO: 8536 - DNA, 101 bp, Triticum aestivum
  Clone ID: uC-tsrow189047f11b1
tgcatctcctccccttccggttcgggttctggttcggttctggtccgagagtagctagcctagtctagggtttccgtagagaggaagggagagggagatcc

SEQ ID NO: 8537 - DNA, 132 bp, Triticum aestivum
  Clone ID: uC-tsrow189047f12b1
ttgcatcccgccgccgcctcctctcggctccttcttccttcgagtttcagccatgggtaaggagaagactcacatcaacatcgtggtcattggccatgtcgactccggcaagtcgaccaccactggccattc

SEQ ID NO: 8538 - DNA, 87 bp, Triticum aestivum
  Clone ID: uC-tsrow189047g01b1
aagaaacaagcaacgaagtttctgtttcgagcaaggagtggtagagatttcaaaccagaggttgctagttaacccgagagttgagga

SEQ ID NO: 8539 - DNA, 106 bp, Triticum aestivum
  Clone ID: uC-tsrow189047g02b1
gcagcaccacccccacgtcacggcctcacgccacggagaacacaacgtcgatccggagagcggagcacgcaatggagcctgtggccgtcgtggcggtgccgttccc

SEQ ID NO: 8540 - DNA, 312 bp, Triticum aestivum
  Clone ID: uC-tsrow189047g03b1
cctatcgctagcgcccacgcgtacgcggacgcgtgggtgcatacgacacaaagcataacaagatgaatttcttcgacccatcgaggaaagaggacttcctgttcatctctggcacaaagatgcgtagccttgccaagaaccgtgagagcccaccagatggttttatgtgcccgggtggctggaaggtcctcgtcgagtactacgacagcttggcaccaccagaaggcagcagcaaaccgcgagaggcggttgcggcttagaagccgtggcgttgattctcgtatcatgaaccaatgatatatgattgtatat

SEQ ID NO: 8541 - DNA, 181 bp, Triticum aestivum
  Clone ID: uC-tsrow189047g04b1
ctttggttatccactccaatccaatccccacagaaatccccatctcaaaaccctagcccgtccgatcccggcgagatggccaacccgagggtgttcttcgacatgaccgtcggcggcgcgccggccgggcgcatcgtgatggagctgtacaaggacgcggtgccgtggacggtggagaact

SEQ ID NO: 8542 - DNA, 361 bp, Triticum aestivum
  Clone ID: uC-tsrow189047g05b1
gtcttgttcatccacggtggcaacttccaaggcacccccattggtgtctccatggacaacacccgcctcgccattgctgctattggcaagctgatgtttgcgcagttctcggagctcgtgaacgacttctacaacaatggcctgccttccaacctgtccggtgggcgcaacccgagcttggactatggtttcaagggcgccgagatcgccatggcctcgtactgctctgagctgcagttcttgggcaacccggtgactaaccatgtccagagcgcggagcagcacaaccaggatgtgaactcacttggtctgatctcatccaggaagaccgccgaggctattgacatcttgaagatcatgt

SEQ ID NO: 8543 - DNA, 77 bp, Triticum aestivum
  Clone ID: uC-tsrow189047g06b1
cattcaatcatatctcttgggagagacaacactgtcttgggagaatagcagcgctcaaattgtggatttggtttcaa

SEQ ID NO: 8544 - DNA, 281 bp, Triticum aestivum
  Clone ID: uC-tsrow189047g08b1
tcggtacgcgtgggccgtagtttaggatttttatgcaattttattctgactcttttctcccaccaatctctctggcctgcttcacgataatcgaccagttctctagtcttactccctctgttcctctctgctctgctttctgactcaaactgcaacaatggctgccccgacctctgcaatcgggttcgagggctactagaagcgcctcgagatcaccttctccgaggcatcgatctttgccgaccctcatggtcgtggcctgcgcgccctctctagggccc

SEQ ID NO: 8545 - DNA, 341 bp, Triticum aestivum
  Clone ID: uC-tsrow189047g09b1
tcgtgttgcccttcatacgaagctgatcggccacctctcaacaacaaagatgaagatagggaaggctcctgagctcctgaagaaggccgtagcgatgtgcaagagcaagaccaccaggctcctcatcctcgcctcgctccagcgccgcaggatgtccatgggcgttgtggtctctcgcaagatcggcgcgctcattgtggccgactgggagagagcggaccgccacaaggctctcgcgctacaaacggtggagaagagaccggtaatcatccaggagagtgacttggaggccaatttctctcgtcacttggcgatgttcggtcaagagaatggtcatggtg

SEQ ID NO: 8546 - DNA, 57 bp, Triticum aestivum
  Clone ID: uC-tsrow189047g10b1
tcctcctcggtcctcgcccccatccaaatcccccgccgcccccctcgcggaggagga

SEQ ID NO: 8547 - DNA, 206 bp, Triticum aestivum
  Clone ID: uC-tsrow189047g11b1
tcattaacattactttatctaaggaaggtatcctctctgcaattgatactgggaagtctgaaggaggtccatctggccgacattgggttctggatccaattgatgggactaaaggtttcttgagaggaggccaatatgcaatcgcactggcactgcttgatgagggcaaagttgttttgggcgtgttgggatgtccaaatcttcct

SEQ ID NO: 8548 - DNA, 142 bp, Triticum aestivum
  Clone ID: uC-tsrow189047g12b1
ctcgcctacgcgtccggggagcagccgcagccatgggtcgcgtccgcaccaagaccgtgaagaagacctcccgccaggtcatcgagaagtactactctcggatgaccctcgacttccacaccaacaagaaggtgctagagga

SEQ ID NO: 8549 - DNA, 332 bp, Triticum aestivum
  Clone ID: uC-tsrow189047h02b1
tgcttagttgtaccaccgtcccagcatcttacaaagcgaattgttaagcttgaaaggggtttgaggtattattatccagcaatgtgcttgaatcagcaggatgaaaattcttctcttctgcattatattcagattcatcaggatgatctcaaacaaaatgtcctacttcagttgcttgctgttgtagctaagcaaccggcttttcaccaattacgttcggtcgagcaacttggttacatagcactgcttagacagagaaatgattcaggagtccgcgggttgcaatttataatccagtcaaccgtgaaggatccatccaatctggatgccag

SEQ ID NO: 8550 - DNA, 258 bp, Triticum aestivum
  Clone ID: uC-tsrow189047h03b1
ggaccacttctctgtttttcacgttgcattgaagcgtaccaaattccatcgcttacaggtggtgtatacgcattgatcacatatctgtatataatgaaactatttatgtctagctactaaccatttggcggacgcagcttacttattcataatcatcaggagcctgtcatcagcaggatccgggggcgaagccgacggtcttcttgccaaggtcgtagagcacgcccgaggtcttctgctgcgtgttcccgatgatgg

SEQ ID NO: 8551 - DNA, 344 bp, Triticum aestivum
  Clone ID: uC-tsrow189047h04b1
ccatcgcgtccgcagaggggggcagccaagatccaaatcttctgtagcgacttgatccgatctccagccgacgccggcgaccatggctcgccgtcaccacctcctcctcctcctccctctcctcgcgctcgccttctccttcgtcgccgccgcccctgagggacagggagatgccgccgccttcatcgacggcgcgtcgcaccgctacctgcgggatcagcagggcgaccaggccacgtcgatgtcacttgatgaagtttccgcagctgtttctgtcttgcttgggtttgcaccacctgccatgcttcccgcgccttcttctgcaaagttaaacgagctgctac

SEQ ID NO: 8552 - DNA, 378 bp, Triticum aestivum
  Clone ID: uC-tsrow189047h05b1
ctttgcgtcagcatcagagcaaagaaaggatgcctccccctgccttggatttgatagccgctagctgattaagcttattacgctctgtcctaccagcagctagcacataaaaatatctccaagaaagagcggaaatcgcagcagcagcagcagcagcaccatcgtgctcagcttagtagcagtagcactgctatctctttcaggctttcagctaagcgggagagctcgctcgctagctgagggagtgccgcgcgccattaatggcggaggcggaagggcagctcgcggcctgctgggggaagcaggacgacgagtggaggaaaggcccgtggacaacccaggaggacaagctgctcctcgaccatgtcgcccagcacg

SEQ ID NO: 8553 - DNA, 88 bp, Triticum aestivum
  Clone ID: uC-tsrow189047h06b1
cccacgctcccgaaacagatctgctctctccctctctttctctctcgtccgcggcgatacgatccgagatggccatgagggcgtggag

SEQ ID NO: 8554 - DNA, 201 bp, Triticum aestivum
  Clone ID: uC-tsrow189047h07b1
gtaaagggtccacgcgcgcaaggtcatcgtgtcgggggacgacgccgcgaggggcctggtccagctcgtcgacgaccatggcgttgccgagctcgtcatgggcgccaccgctgaccgcggatacaccaggaagttgcggacgccgaagtctaagaaggcggtgacggcgcatcggaaggccaacccctgctgcaggatctg

SEQ ID NO: 8555 - DNA, 324 bp, Triticum aestivum
  Clone ID: uC-tsrow189047h08b1
tcgcttcgcgtccgcctgccaatcccctcaccggctgcgctcccacgccgccgaatccgagacctgatctcggattcaccgcagcgcgaccaaaccctcaggcgatccccggcacctcctccccgacgcttcagccatggcaggaatggcaccggaaggttcccagtttgacgctaagaactatgattctaagatgcaggagctgctgaaccaaggtgagactgaggagttcttcacctcttatgatgaagttcatgagagctttgatgacatgggtctccaagagaacctcctcagaggaatttatgcttatggttttgagaa

SEQ ID NO: 8556 - DNA, 202 bp, Triticum aestivum
  Clone ID: uC-tsrow189047h09b1
tcgcattcatcactccatccgacgtacgtagatttcggcccgtctgaaacactcgctcaaccaatccgtccaaccgtacgtactcggagactcggaagatttgcatggcgtcgtcggcgacgatggcgaggacggtggtggtggccttgctgctgacgcaattctgcgacgtggttctggcggtgaggctgctggagggggg

SEQ ID NO: 8557 - DNA, 179 bp, Triticum aestivum
  Clone ID: uC-tsrow189048a01b1
tgtctcggctgcaccacatggcggagttcaaggaggaggcccagctctgggtcgccgccaacgtggcgccgttcctcccggcgaccatgatcacgcacgtcctggcgggagacgacgtcctgtcaagctctcccggggccgcctactcgctggtccccgccatgctgaaccttcacgcc

SEQ ID NO: 8558 - DNA, 328 bp, Triticum aestivum
  Clone ID: uC-tsrow189048a02b1
tctctaggtcgccggtcatccacaacaaggacgatgtcgccggacgtcatctccatggccttcgtgcccatcacctccctgctcaccggcgtccccggccgcggcttcctcaaccacgccgtcaatctctacctcagatacaagccgcccatagaggagctggagcagttcctggagttccaggtgccgcggcagtgggcgccggagttcggcgagctgccgctggctctcggcccgcagaggaagaagaagaaggacagcctgccgtcgctccagttcacgctcatggggcccaagctccgggtcaacacggccaaggtggactccg

SEQ ID NO: 8559 - DNA, 354 bp, Triticum aestivum
  Clone ID: uC-tsrow189048a03b1
tgggttatatcaggcaaagacctctgaagagcgaggaatgttagaaaccccaattcgtgctcggcaaatagtgcctcgtgttcgcggcctttatgggatggacatttataagaataaggtcttagaattcttacaaagtgaacgatctgatgagtctatatttggattatggggcacgtcgggtgttggcaagacacggcttctttcactcatcgctgatagctttgccgattcatttcatcacgtcatatttcttgatggtggtagtagcgtcagagttatgcaaaatcatttcgcatactttttgaaattggattgggagacaatctcattgttggaggagcattaccgagc

SEQ ID NO: 8560 - DNA, 231 bp, Triticum aestivum
  Clone ID: uC-tsrow189048a05b1
gaaaaggacttatagtgtccgatgttccttatgccgagacatgtccattcagaaatgaagccatcaagaataacctagagcttgtgctacttacaacaccagccacaccagcagagagaatgaagaaaatcactagcgcttcagaagggtttgtataccttgtaagtgtcaatggagttacaggtccacgaccaaatgtgaacccgcgtgtcaaagatcttcttaaggaga

SEQ ID NO: 8561 - DNA, 248 bp, Triticum aestivum
  Clone ID: uC-tsrow189048a06b1
tttccttgcgtccggtataatattcacgtgaactgttcaagccttgcagatcctcccactgattactaccttgtctctgaatctacacaactgggcataatcatgcctgcttgtcactcggtaaacggccctctcgaggactacatctcccacattgtcgagtggctgtctcgaccacatgtgctggccataataatagcatgggctgtgacctttaccgctgattgctctttgatcctttgcttggg

SEQ ID NO: 8562 - DNA, 179 bp, Triticum aestivum
  Clone ID: uC-tsrow189048a07b1
ttgcacgcgtccggacgtggtggagttcaggcgggtcgtggaggaggagaaggcgtgccttgatgccgcggggtcgtggtatgggccctcggcggccggccttggccggctggccgcggagagccggacgccggccatggtcgccgcgctatacgggagcacggccgtgctggcgcacg

SEQ ID NO: 8563 - DNA, 134 bp, Triticum aestivum
  Clone ID: uC-tsrow189048a09b1
ttcgtctggcaccgcacgacagacagcacgaggaaggcgagccaaccaccaccgccgcgagactagcaccacgagcgagctcggccgattccgattccgtctgcgctattaaggtttgtttggaggaaggggag

SEQ ID NO: 8564 - DNA, 219 bp, Triticum aestivum
  Clone ID: uC-tsrow189048a10b1
tttcccacgcgtccgtgcagcctcatgcctatgtggaaacggcagctggtaggaagccgcttgttggcgtccatggcgccctaggacataaggtgctcaggtggttcatggacgaccataaatgcgacactgttaaaatcatctccatggttggacccgttggggtggggaagacagctattgccatggaggtctaccgcagactccaaagtagaggag

SEQ ID NO: 8565 - DNA, 194 bp, Triticum aestivum
  Clone ID: uC-tsrow189048a12b1
tgtggagcaggagcaagaagaacctgggcagcaggagcaggaccgagatgaacggcatgtacccttctcagcgtttcagcaacgtgatagtcggctacctcaacctggtcacgctactggcctccatcccgggcatcggggcggggactttgctggccaagggcttcacgacgacatgctgctccatgctgcag

SEQ ID NO: 8566 - DNA, 144 bp, Triticum aestivum
  Clone ID: uC-tsrow189048b01b1
tgccctcgcgtccgcccacgcgtccgcccacgcgtccgtccttctggcccacacgcacgaaccaaccggcgcgaccgaatcaaaccgcgcaaccgtgcgcgcgactcctcgtgggggccgggcgggcgcgatgcccctggacgg

SEQ ID NO: 8567 - DNA, 451 bp, Triticum aestivum
  Clone ID: uC-tsrow189048b04b1
tgcttttccccacggatccttctcgtcttccacgtgattcgagtcgtctcgcctctctccgtcagcccaaacatggactcaagcaggcgcccgagtggaatccagcaattgcttgctgcagagcaagaagctcagcaaattgtaaatgctgctagggctgctaaaacggcgaggcttaggcaagccaaagaagaggctgagagagaaatagctgagtaccgtgcacaaatggaggctgatttccagaggaagctcaccgagaccagcggtgactctggcgcaaacgtcaaacgccttgagcaagagacaaacgtaaagattgagcagctcaagcagcaggcagcaaacatctctccagaggtgattcagatgcttctgaggcacgtcaccactgtgaagaactaaaggttgatgagtcagccctgcatatgatggcaactttgtactatct

SEQ ID NO: 8568 - DNA, 290 bp, Triticum aestivum
  Clone ID: uC-tsrow189048b05b1
ttcccacgcgtccggagaaggtctggagagagaggatttcattgcaaaacaaaaagatggcagcaattgaagacgactcgtgcaggagggcgggctcgataccgttcaagtgggaggtctgtcctgggacgccgaagcacacgaggagcgcgagcgccgcggcggcggtggcggcatcgcctgccaaggtggcgcccaagctgacgctgacgccgcctccctccatggcgtcctcgccatcgccgtattaccaccactcggcgggcttcgtcgcctcgtgtcacctccgc

SEQ ID NO: 8569 - DNA, 358 bp, Triticum aestivum
  Clone ID: uC-tsrow189048b06b1
tctcttatctgaccggtcgcgccaaaccgagctctagcatcagctcgtcggagttcgcaccggtcgactcagaactcttcaccaatggccgccgtccaggtccaagccgcaacccacgccattcccgtcgaggaggctccggcgccggcggcggtggaggctgtcgagacggccgcggtggcggtggaggctgtcgagccggccgtcgtcgttgtcgaggagactacggtggcagcggtggagattgtcgagccggctgtcgccacagtcgaggtggcagcggtggaggctgtcgagccggccgttgtcgctccccaggaggccgtgaaggaggaagctgctgcaccggccgtgaccg

SEQ ID NO: 8570 - DNA, 369 bp, Triticum aestivum
  Clone ID: uC-tsrow189048b07b1
ttgtctggccagcttctctcgtctctggttccctgtaacctacaccatttctttctttttcaagcgtgaggcatcacagctccttacttgctgcccttcataagcagctgatcggccacttatcagcaacaaagatgaagattggaaagactacagagatcctgaagaaagcggcggcgatgtgcaagagcaagaccaccaggctcctcatcctcgcctcgctccagcgtcgcaggatggccgctgccgccgtggtctctcacaagatccacacgcgcattgtggctgaccgaaatagagtggactgccacaagcctctcgcgctgcgaaccatcgagaagagaccggtgatcgtccatgggggtgact

SEQ ID NO: 8571 - DNA, 380 bp, Triticum aestivum
  Clone ID: uC-tsrow189048b09b1
ttaaaaaatatttttcttgggaggagtgcatcaatctccgtgaagttaagtccctccgaaggatgaaccatccaaacattgtgaagctcaaggaggtcataagagagaatgatatgctgttctttgtttttgaatacatggaatgcaatctctatcagctgatgaagagcaagggcaagcctttttcggagactgaaatccggaactggtgctttcaaatatttcaagctcttagtcacatgcatcaacgtggatactttcatcgtgaccttaagcctgaaaatctgctagttacaaaggagctcatcaaggtagctgattttgggcttgctcgtgagattatttctgaaccaccatacacagaatatgtgtcaactcgc

SEQ ID NO: 8572 - DNA, 167 bp, Triticum aestivum
  Clone ID: uC-tsrow189048b10b1
ttcgtctgcggacgcgtggacaaacccaaccaagcacatagtaacatcgaccgatcggcatggcgcacttccaggaggtggactactgctcggaggaggtgagggcggagggcaacccggcccgccgcggcggcggcgtgcaggagcacatcgtcaaggagacgttc

SEQ ID NO: 8573 - DNA, 394 bp, Triticum aestivum
  Clone ID: uC-tsrow189048b11b1
ttcgttcggctcaccactcatcaggttgctgccgcaagtatgtcaaacttgaggtgtgttactctgtttagaacagatgacaatctgatccggtcctctttcaagcctccaactgctgcgtgcgttggactctatcaggttgtgatcttcggaaaagtagctaccaaatctgatcttaggtgtatggagaaattattacacctgaggtacctagggctactagatacacgggttgatgctctccccattgaaataggaaaacttcaatctttgcaaacattggacttcaggacaagtaaatctttggaggcaccatcaagtgttgttcggctaggaaagctgatgtgcctatatgttaatgagaacatgaggttaccggttgtgatagacaact

SEQ ID NO: 8574 - DNA, 84 bp, Triticum aestivum
  Clone ID: uC-tsrow189048b12b1
tgcccacgcgtccgataaagataaaaaaaagaaaaaataaaacaaaagaaaaaaaaaaagaaaaaagaaaaaaaaaggggcgcc

SEQ ID NO: 8575 - DNA, 230 bp, Triticum aestivum
  Clone ID: uC-tsrow189048c02b1
tggcttatcgggacagtgcagagcttccctgtagagaagtttaggagcaacgatgaagagtagcacactcgtggtcatcctggttctccaggccgtcctggtcatggggatcctctcacaggccaacgccgagttcccaaagtgctgcgacagctgcaggttcttctcgggggccgtggtctgcgacgactcctgccccaagtgccgcgacggctgcgtgaactgccgcg

SEQ ID NO: 8576 - DNA, 340 bp, Triticum aestivum
  Clone ID: uC-tsrow189048c03b1
tcccacgcgtccgaccaaaccaaagctgcggcggcgcgcgcataggaggcgaatcagcagcggaaccaagccgccgacgccaccatgggtatctcgcgtgactccatgcacaagcgccgggccaccggtgggaagcagaaggcttggaggaagaagcgaaagtatgagctcggccgccagccagccaacactaagctttcaagcaacaagacagtgaggagggtccgtgttcgcggaggtaacgtgaagtggagggctctccgtcttgacactggtaacttctcatggggtagtgaggctgtgacccgcaagacccgtctctggatgtggtttacaattc

SEQ ID NO: 8577 - DNA, 231 bp, Triticum aestivum
  Clone ID: uC-tsrow189048c04b1
tccctgaccaagagagagatccaggacttggccggccggccgtagatcgagaaggaggaggagacatggtgcgcgggaagctggaggtgctgctcgtctacgccaagggcctcgacgactccgatttcttcaatagcatggacccgtacgtgatcctcacctgccgcagccacgagcagaaaagcaccgtcgcatcaggagcagggagcgagcctgagtggaacgagacct

SEQ ID NO: 8578 - DNA, 372 bp, Triticum aestivum
  Clone ID: uC-tsrow189048c05b1
tgtctgcaccagttgctctggagcatcactcaaagggcatgcctataagaccaggtgaagttgattgctcattttatattaagacgggcagctgcatgtatggtagaacatgtcggttcaaccatcctggacgacatattcaagcatctgttgtccctggcgagatgctaaatccagctgcgaaattcctgccgagttttgattttcgcgtgacacatgtgccgattgaacctgagccaatcacctaccctcagaggcctggagaaactgtttgtgatttgatcgctctgcacctgattccattgcaaagtgggagccgtctcagcaacctgtgacgcttactgttgctggctttccaaggagagaggatgc

SEQ ID NO: 8579 - DNA, 89 bp, Triticum aestivum
  Clone ID: uC-tsrow189048c06b1
tcgaatgggctctcgacttgctcccagagccggagccgacccgagccgagacctgcctctcctgctgcccgaacacccatggggtcggg

SEQ ID NO: 8580 - DNA, 52 bp, Triticum aestivum
  Clone ID: uC-tsrow189048c08b1
ttcccacgcgtccgggggatttgaggtttcaagggaattggatggaagaggg

SEQ ID NO: 8581 - DNA, 162 bp, Triticum aestivum
  Clone ID: uC-tsrow189048c09b1
tttcccacgcgtccgatatactagcattgattgccgagaagatcttgcccatcgccatttgccactaataccatcgctccatcgccaactccgctagcctgctaaggagactcaatgccgtccctggcgaaagctgcggcgtccatggatcacgcggtggag

SEQ ID NO: 8582 - DNA, 317 bp, Triticum aestivum
  Clone ID: uC-tsrow189048c10b1
cggacgcgtgggttccgatacgcctctccagggcgcgattttttccgtcccctctggcgcacccatggcttctccgtatctccttcaccgtctcaccgccgacgagatcttccaaactctagaggcttcctcctccacgtcctcctcatgctacgatgccttcgtgccggtgttccgcccagatccctcggcctcctccctatccgtgtcggcggccgaccgcgtccggagccagttcctctccgtggagcgcgacctcttccacgacgcactcgtcgcgcccaggaatgacgacctcggcttccccgaggagaacg

SEQ ID NO: 8583 - DNA, 158 bp, Triticum aestivum
  Clone ID: uC-tsrow189048c11b1
tgcggacgcgtgggagagtacgtatgtagactgtttaatcatttttaatgttctttttattgttaatctctttctttctttcttggcgagttctttcatggcttatggcttgtattcgttttgtacgatctgcatgatgaataaagtttttccttact

SEQ ID NO: 8584 - DNA, 140 bp, Triticum aestivum
  Clone ID: uC-tsrow189048c12b1
tgcggacgcgtggggtggtgctcttgggaggcccatattacaaggcctcggtcagtgctcttgatgcaacttgatggatcccatgactatgttgattgcttcatatctgatgccggcagtatttacaaaaccaagattga

SEQ ID NO: 8585 - DNA, 162 bp, Triticum aestivum
  Clone ID: uC-tsrow189048d01b1
tgctaggtcgaagacaagatagtctccgtgctcatccatcatcttccatggcgccgctgcacttcctggtcgtcgcgttcccgggccagggccacatcaacccggcgcgcgctctggctgagcgcctcgcgcgggccacgccgggcgcgcgggtcacgctct

SEQ ID NO: 8586 - DNA, 270 bp, Triticum aestivum
  Clone ID: uC-tsrow189048d02b1
tgccctcgcgtccggccagacctggaggagcattactgcgggatgtacgtgggcaatggctacgcgaagcgtgcgtacatgctaggccccgtgtcactacgaccgccgtcgtcaccggaagccgacgactcacggtacaccgactggcttgactcgaagccaagccggtcggtggtgtacgtgtgcttcggcagcctcgcccacgtctccgacgctcagctggacgagctcgctctcgggcttgaggcctcagggatggcgttcctgtgg

SEQ ID NO: 8587 - DNA, 314 bp, Triticum aestivum
  Clone ID: uC-tsrow189048d03b1
tttgtgtcaacatgcagattgacccggcgaaatacaagagcatctcatctggatttggtgttctgttaaaggagcaaggagctaggggattcttcaggggatgggtgcctaccttgcttggttacagtgctcagggggcttgcaagtttgggttctacgagttctttaagaagacctactcagatatggctgggcctgagaatgctgtgaagtacaagaccctgatttaccttgcagggtcagcttctgctgaggtaattgctgatatcgctctgtgcccctttgaagctgtcaaggtccgcgtgcagacacag

SEQ ID NO: 8588 - DNA, 338 bp, Triticum aestivum
  Clone ID: uC-tsrow189048d06b1
tttaagtgatatgaggtactcagacctgaagaagatcgaccgctgtgacaggaggcactttcatgacgatattactgttgtagtactattcatggaccctgcgcttatcagcaggaggctctacggtgggccgttgctttcgctaaggggcggtggtggtacctcgacgtttgcacagaaatgctgatcatccatgacagatgctttctggaaatatcctcctatatatcgttcatatcttggcctggtgctctccacacgacatgcagacactgcgtatagcggtgcgtggaggagccgtattgttttgacttctaatatgcacagatagagagaga

SEQ ID NO: 8589 - DNA, 63 bp, Triticum aestivum
  Clone ID: uC-tsrow189048d07b1
tctcttgtgctttgggcgattccatccgaggcgagaagaggagaggagagcacatgaggaggc

SEQ ID NO: 8590 - DNA, 216 bp, Triticum aestivum
  Clone ID: uC-tsrow189048d08b1
tgaatcgatccttgcttcttcctcctgtctgctcacctgcaacctatcaaccgccctcccctgcgctgcggctaccctccaagcaagctgcccatggcgaccaaaaccctagccctacgatgtccggctcaggcgggccctcaggccgcggctcagcaggcggcactcggagcttcgacttcggcaccgacgacgtgctctgttcctacgacgact

SEQ ID NO: 8591 - DNA, 346 bp, Triticum aestivum
  Clone ID: uC-tsrow189048d09b1
agccgtcctccgcctccccgtgtcgctcgctcccacctctcgccgccgccgtcgtcgcccgcgcagccgcaaaatgccgttcaagaggttcgtggagatcgggcgggtggccctggtgaactacggcaaggactactggcgcctcgtcgtcatcgtcgacgttgttgaccagaacagggcacttgttgatgctccggacatggtccgctgccagatgaacttcaagcggctctctctgaccgacatcaagattgacatcaagcggatccctaagaaggcaactttgatcaaagcaatggaggaagctgatgtgatgaccaagtgggaaaacagctcatggggcaag

SEQ ID NO: 8592 - DNA, 409 bp, Triticum aestivum
  Clone ID: uC-tsrow189048d10b1
ttaaacctttctccttctgtcccgcaaacccccgagagatcacagcatgttcggcttcggtcaccacggccaccatggccagaaccccccggcccacgctccggccgccgccggaggcaaccagcccaccttcaagatcttctgcaaggccgacgagggctactgcctctccgtccgtgacggcaacgtcgtcctcgccccgtccaacccccgtgacgagcaccagcactggttcaaggacatgcgcttcagcgcccagatcaaggacgaggagggtaaccccgccttcgccatcgtcaacaaggccactggcctcgccgtcaagcactcgctcggccagtcccacccggtgaagctcgtgccattcaacccggagtacctcgacgagtccgtgatgtggacggagagc

SEQ ID NO: 8593 - DNA, 227 bp, Triticum aestivum
  Clone ID: uC-tsrow189048d11b1
tggattgcctttgtggcctccttggtagccatcatccttgtccagacggatattctggtcaggcaccacgtgctggaggcagccatgatactcgatctgtttggcctcatcggcgcgtatgccgccgggagctgccgggacgtgaacacctccatttatgccatagctttggcaggcgccgtcctggtctatgtggtgatccatatcgtcttcttcacgctggacca

SEQ ID NO: 8594 - DNA, 136 bp, Triticum aestivum
  Clone ID: uC-tsrow189048e01b1
tgctcttcgcacgcagctcgctcgaccagaacacctcggagcagcagcagcggcggccggcggagaccgtgtcatggcgatggagggctacgaccgcgagttctggcagttcggcgaccagctgcgcctccagacg

SEQ ID NO: 8595 - DNA, 164 bp, Triticum aestivum
  unsure (1)..(164): unsure at all n locations
  Clone ID: uC-tsrow189048e02b1
ttttnctgcttcccctcccctcgggcagcccagtcgtcgtcgcgaccgaggaccagacaccagacgcgggcggggagctcgaggcggcctgcgggacagcagcatcggcggcggcgagtcggggcagggccagcagcgatggggttcgtctccttcgtcgggag

SEQ ID NO: 8596 - DNA, 335 bp, Triticum aestivum
  Clone ID: uC-tsrow189048e03b1
tttcatgtccacaacacacaacgaacccatctcatccactctttcaagcaaggcaagagagatcgagcgagcaatggctcccatgctcaaggggatcgtggaggacgcgccgaagagggcggcgtacgtgaccttcctcgccggctccggcgactactggaagggcgtggtgggcctggccaagggcctccgcgccgtcaactccgcctacccactcgtggtggccgtgctccccgacgtccccgaggaccaccgccgcaagctgctcgcccagggctgcctcgtccgcgagatcgtgcccgtgtacccgccggagagccagacccagttcgcca

SEQ ID NO: 8597 - DNA, 313 bp, Triticum aestivum
  Clone ID: uC-tsrow189048e04b1
ttggactctgtgcttgacgcgtgcctcgcccaagacgctgacagcaaggttgcctgtgagacatgcaccaagaccaacatggtcatggtttttggtgagatcaccaccaaggccactgttgactatgagaagattgtgcgtgacacctgccgcaacattggcttcatctctgatgatgttggccttgatgctgaccggtgcaaggtgcttgtcaacatagagcagcagtctcctgacattgcccagggtgtgcacggacattttaccaagcgccctgaggatattggtgcttgtgaccagggtatcatgtttg

SEQ ID NO: 8598 - DNA, 351 bp, Triticum aestivum
  Clone ID: uC-tsrow189048e06b1
gcttgcggtgcccttgtgagccacactagatgcctgttgtagtagacctcatctcaggactgctgcgagatctccatacacatgagccaggctagccatactccggaccccacaatggctacggtcccgatcggatcaagcatcctaaggactcccaagagtaatccaggcaagacattcacaagtagaaacaggcttgaaactccaaaaacatcttataacagaacaaaccgcgctgagccgccctcagtgacacctgtgaacaagagtgctcgactggctcgaagagtatccctcccgctgtcgacatacgaaacgcccatcaagcgcagcatcagcattcttgaccag

SEQ ID NO: 8599 - DNA, 296 bp, Triticum aestivum
  Clone ID: uC-tsrow189048e07b1
tgacgaatgtctcatcaagaggacgctggatacaaatgtggattttgactgtggcctgactgacagagcgattggataccctacagaaatcgtacctgtgttatttgcattacctcgcatggctggttggctagcacattgctaggagcgacttgatgaccctgtccataaaatgatgaggcctcaacaggtatacgcgggcggttggctgaggcattacacccccgtgagggaacgagtggcatctaaccagggcgaggaacttggtcagatcgctacatcgaacgcaacgaggc

SEQ ID NO: 8600 - DNA, 147 bp, Triticum aestivum
  Clone ID: uC-tsrow189048e08b1
tcgctcgcaacacggatggcctagacgactccaaagagtttgttgcagcaactgtccacatacatcagatggctgagctggactctgaaaggtggggcctgcgctgccaagctgctttaagcaaattcgatctggatggtgatggat

SEQ ID NO: 8601 - DNA, 376 bp, Triticum aestivum
  Clone ID: uC-tsrow189048e09b1
ttggtttgtaataggcacgagatggcccgtgtagcggagcaaaaactccagcctagttgcctcggtgacgcgctgacggcgaggaacgatgccgacaacctcaccgagctcatcccgtcgctgcccgtcgagaagcggctagtgccgccgcccgccgacatgcagaggcgacagcaccgtgggtactggttccccgagtggcacctgtcggccctggcggcagtccgcgatcacttcgagcccaagccaacggacatcttcctcgtgagctgccccaagtctggcaccacatggcttaaatctctagccttcgccactgtgcaccggcacgtccacccgtcatccagccaggagcaccctctgctccaccaaaacc

SEQ ID NO: 8602 - DNA, 52 bp, Triticum aestivum
  Clone ID: uC-tsrow189048e10b1
tgggccgccgaggctcctggcggggttgatgccggtgccggtgatggggatg

SEQ ID NO: 8603 - DNA, 261 bp, Triticum aestivum
  Clone ID: uC-tsrow189048e11b1
ttcggacgcgtgggttatcattcctgcaaccaacaccggatcaactagcagaggcactgcgagctcgccaggcttccagagcgtacagggtggccgatcgatcgatccaccggcaagcaatggcggcgacagggagcgctaagggcctccggttcgctgcagcgtgcggcgtcctcagccgctgcatcaaggcggcggacgcgcggccggcgcccacggtcgttctccccctcatgcccggagcggaagtgcccgcgcaag

SEQ ID NO: 8604 - DNA, 227 bp, Triticum aestivum
  Clone ID: uC-tsrow189048e12b1
tgcatggacctcttgaggaagcgcatggagccagaggagaagtgcctgagggatgccaagatggacaagagcactatccatgatgttgtgcttgctggcggtcccaccagaatccccatagttcatcagctgctgcaggacttcttcaacgggaaggagctctgcaagagcatcaaccctgatgaagctgtggcctacggtgctgccgctcaggctgcaatcctcag

SEQ ID NO: 8605 - DNA, 189 bp, Triticum aestivum
  Clone ID: uC-tsrow189048f01b1
ggagcctgacacgagggccctcaactaattgcgagtggattgatggctcacgggtgaactctgaagtggagcctaaactgaggagtctcctactcgagatgggaagcgacaaaattttgggactacaagtatgtgcatacaaagacggaaaggtcataatagacaccgctgctggtacattagggaaat

SEQ ID NO: 8606 - DNA, 314 bp, Triticum aestivum
  Clone ID: uC-tsrow189048f02b1
ccttcaactcccctccccaccttctccctccgcctcgccttctctcgacggtcgacgctatagcttttcccaaagtgcacgcgccatggcgagatcacgagacaccaggctcaggctcaggctcacgctcctcctcgtcacccttcttctgctagtagacatggcaagcgtcagccatggccgacggacaccggacgtggatgccatggccctcgtcggtggcggtccaccaccggcgaaggcctactcctccgagcagtcgtcttcgtcgacttcaagggagcatacggctcgtgtttatcggcgcatgcaca

SEQ ID NO: 8607 - DNA, 216 bp, Triticum aestivum
  Clone ID: uC-tsrow189048f04b1
tgcgttcatggggatggcggactggttcaggaaggactttgttggacctgtgccatcgccgttcgaggacgtgcatggcgcggccatcttcgaggagagcatgacgctcctggacccggagatggatcagctgatccacgacgccgtcgctgctcacgaccacatggggatcggccccgtgctccggcagtgccgtgagctcttcgaggggcttga

SEQ ID NO: 8608 - DNA, 240 bp, Triticum aestivum
  Clone ID: uC-tsrow189048f08b1
tgcacaacgagccacacaaaacaaacacacacgagcattagttagcttgggtgctccagcaatggcagtgacggtggagatcacgcagagaacggtgctcgagccctcacgggactcggcccgcggcggcggcaagaaggtccctctcaccgtcttcgaccgcgcctccacggacggctacatcccggccgtcttcgcgtggaacgcaccggcgccgaccaacgacgcgctcaaggccgg

SEQ ID NO: 8609 - DNA, 147 bp, Triticum aestivum
  Clone ID: uC-tsrow189048f09b1
ttgttttatgggggtccctcaccgttgaccgttcccttcaactaaaatagttccacatgtgtactgtttttagataacatggaaaataacattttatgtaccaagcaatattgctttgctgtcacaaattaaagatcatttcacgtt

SEQ ID NO: 8610 - DNA, 75 bp, Triticum aestivum
  Clone ID: uC-tsrow189048f10b1
ttcccacgcgtccgcggacgcgtgggggccggcccagctaaactccccacctgacaatgtcttccgaccggatcg

SEQ ID NO: 8611 - DNA, 305 bp, Triticum aestivum
  Clone ID: uC-tsrow189048f11b1
ttcgtttgaccagaagaagatggagacgagccggcgcggcgggttcgcggacgaggccctggcgcccaccgagtcggacatcgacgagaccttccagcggatggtgggcgggctgggcaagacgccccaggaggtgttcgacgcgctcagggcgcagaccacggacctcgtcttcaccgtgcaccccacccagtccatccggcggtcgctcctggagaagcacgccagcatccggacgtgcctcacgcagctgtgcgtggagggcgtgtccgagaacgagaagcaggagatcgacgaggccctgc

SEQ ID NO: 8612 - DNA, 124 bp, Triticum aestivum
  Clone ID: uC-tsrow189048f12b1
tgctttatctgcgagtttttccgtgatgcccaagagaaggttcttccgtatgcggactatatctttggaaatgaaactgaggcaaggatcttctctaaagtccgagggtgggagactgagaatg

SEQ ID NO: 8613 - DNA, 136 bp, Triticum aestivum
  Clone ID: uC-tsrow189048g01b1
aagcagagcctcccctggccactgttacgctccaagctcgctaggcttcgagagcgtacagggcgaccgatcgatcgagcgagcgagcgagcggctagcacggcggcgacagggagcgctaagagccgacggttcg

SEQ ID NO: 8614 - DNA, 217 bp, Triticum aestivum
  Clone ID: uC-tsrow189048g03b1
tctgttgggaacatttctcaacttgcaaaggtgaagatcatgaaaagacctggtgccaaatgggaagagcttaaaatccccagcagtattcgatcaattatctgtctcaatttgccaagtttctcgggaggattcaatccctggggaactcctggcacaaggaagaaacaagacagagacctgactgcgccttatgttgatgatggactcattgagg

SEQ ID NO: 8615 - DNA, 380 bp, Triticum aestivum
  Clone ID: uC-tsrow189048g05b1
ggatcaggctatgcgtgaggcacttggcttagctcccaagcgtagcagtcgaccaaaaggcaatcgtttagataagcatgaatatgctgagctaataaagaggggatctaccgcagaggatttgggagccggccatgctgaagcagcacaagtgcaaggattaggtttatacaaggctcctcacaacgaggaagaaccaagctctcttagtcctgaccctcctggaacggagcctgagcagattgactttgcacctgcaacgaagcaggaagattctgaagatgatggaaggggaaaaggcggcgcgaagacaggagaggggacagagaaaaagagcggaggcgtgataagcactatgagggaaaagagaggaagcgaga

SEQ ID NO: 8616 - DNA, 267 bp, Triticum aestivum
  Clone ID: uC-tsrow189048g06b1
tgcattctgtcctactgtcgcatacacacacaagtgctagctagctaatcgatcagccggcggccatggcggaggagaagcaccaccaccacctgttccaccacaaggagggcgaggacttccagcccgccgctgacggcggcgtcgacacgtacgggtactcgaccgagacggtggtgaccgccaccggcaacgagggggagtacgagcggatcaccaaggaggagaagcaccacaagcacaaggagcacctcggcgagatgggcg

SEQ ID NO: 8617 - DNA, 305 bp, Triticum aestivum
  Clone ID: uC-tsrow189048g07b1
aaaccgaggaaagagagagacggacaggatatactcgctgctctgccgcccccttcgcctttagttgatctcgccatggctgccaccgtcgccgtggacaacctgaaccccaaggttttaaaatgtgagtatgctgtgcgtggagagattgtcatccatgctcagcgcttgcagcaacagctgcaaactcaaccaggatctctaccttttgatgagatcctctattgtaacattgggaacccacaatctcttggtcagcaaccagttacattcttcagggaggttcttgcactttgtgatcatcc

SEQ ID NO: 8618 - DNA, 288 bp, Triticum aestivum
  Clone ID: uC-tsrow189048g10b1
tgcccacgcgtccgcccacgcgtccggccagctgtcagaaaaaataggcaatctgaaatccctctcattcctatcacttgttaacaacaatcttacaaatatcacaagtacacttccgatacttgcaagatccaagagtctcaccacccttcttattgggctcaacttcatgaatgagaccatgccagacgatgacatcattgtcagttttgagaatcttcaggttctagcaataacagattgctcactgttggggaaagtaccacattggttatcaaagctgacaaa

SEQ ID NO: 8619 - DNA, 75 bp, Triticum aestivum
  Clone ID: uC-tsrow189048h02b1
gctctctcatgtctatacggctatcttgaagccggataacgaggtcagaattctggtcgacggggaggagaagag

SEQ ID NO: 8620 - DNA, 352 bp, Triticum aestivum
  Clone ID: uC-tsrow189048h04b1
ttataatgtatatcaaaggttatgggtgaaagaggctgcaacgtgtcaccgcagcagtgcgaggataagttcaatgacctcaacaagagatacaaaaggcttacggatatccttggtcgtggtactgcttgcaatgttgtggataatccagcactccttgattgcatgaataatctgtctgataagatgaaagaagatgcaaggaagatattgaactctaagcatttattctatgagatgatgtgttcctatcataacaacaaccgtgtgaatttacccgaagatcctgcacttcagcactcactacaggttgctcttagatgtaaagaggagcatgatccgaggagggatg

SEQ ID NO: 8621 - DNA, 408 bp, Triticum aestivum
  Clone ID: uC-tsrow189048h05b1
tattgatttcagccacaagaacaagcttggccctatagagagcctgaagaactatcccagacaaaacgggccaaagcttacaatgcagaacatgcatgaggcaaagggggccaacacagaaattagcacccatgggaataacgaggccccaggtgtcggaaccgttagtagcagtctgcagaatgccgtggcacaaaataactaccagagtatgctgagaagctcaagtgcaaaccagggtttgcttcagcaggaggcgtcacagaatgccgcagcactaaacaattaccagagtatgcttagaagctcaagcgcaaaccagggtttgcttcagcaggaggcgtcccagaatgccgcagcactaaacaattaccagaacatgcttagaagctcaagcgcaaaccagct

SEQ ID NO: 8622 - DNA, 256 bp, Triticum aestivum
  Clone ID: uC-tsrow189048h08b1
gcaaggggaatttctgccttctaatactttgcttgcaggatgattccccttacaaggctctgggcgactccgacacacactgccattttgccacaaccctacagataccataacaggacggataattcattgggaccaggtggagatcttcaggtgtatctagagaaccttgctgctgcagatgatgttcagcgttatgtacaggagcacccttttggtcaacctttcattactgagagtgatccgaattgggatt

SEQ ID NO: 8623 - DNA, 270 bp, Triticum aestivum
  Clone ID: uC-tsrow189048h09b1
ctccagcacccgatcaagcagagcctcccctccccactgtgacgctccaagctcgttaggcttcgagagcgtacagggcgaccgatcgatcgagcgagcgagcgagcggctagaatggcggcgacagggagcgctaagagccgacggttcgccgcagcgtgcggcgttctcagccgctgcatcaaggcggcggaggcgcggctggtggctctccccctcatgcccggagcggaagtgcccgcgctgcaagacgagcacgcggtgggtcct

SEQ ID NO: 8624 - DNA, 149 bp, Triticum aestivum
  Clone ID: uC-tsrow189048h10b1
tgctgccatccaaacagcccccaaatgcgcgcgcctctcacatgccagaccgctgctgagcctggccgacatggccaccgcctcgatcgccgtccgctcggccttcggtgtcgccctggccgccttgatcgcggagcgtgccccccggc

SEQ ID NO: 8625 - DNA, 334 bp, Triticum aestivum
  Clone ID: uC-tsrow189048h11b1
ttgccggcccaagaagcgtgggcgcgagcgtaagcgctgacgaggagttctcccccaatccctggttcccctgcgccctacacgttctcgcccacgttgccgccgccagctcctccccctttcgccggagctcctttctccggcagtagagatggtgaaaggcgcagtccgctatgagcctggaccggcgtttcaggagagtggagagcagggcaagcttgaaataccagcatctggctccacagaattttggctaatacagcggcctgtaaaccatgtaaatgcttctgattttaatggtcaagaagtttctcttaataagcatcatgacgat

SEQ ID NO: 8626 - DNA, 136 bp, Triticum aestivum
  Clone ID: uC-tsrow189048h12b1
ttcgtctgtccgaacaatgttcgccctccgcaaaaccctgctccacggacgccttcccgcgccgtcggccaccgccgtctgcaggatctcctccttcctccgctccctctgcacatctccggggggcgagggggtc

SEQ ID NO: 8627 - DNA, 136 bp, Triticum aestivum
  Clone ID: uC-tsrow189049a01b1
tcacgcgtccggcaactaccccggctgaagctccttctgctggtggtgtcagctactctgatgctggaggtgctggcactggcggaggaggaggcgacggtggaagtggaggtggtaatggagctggaggtggaca

SEQ ID NO: 8628 - DNA, 205 bp, Triticum aestivum
  Clone ID: uC-tsrow189049a02b1
tttacgcgtccgcccacgcgtccgcttcgagcgcctcctcctgtctcgccctcgccccccgtcccctcgtcggcgcccgatctaagtcaagatgagtcgtggcgggagtgctggtggtggtcaaagttctctgggttacctgtttggagatggtgagcctgcaaagcccgctgcagcaccagctgcgaagcccgcacctgctgag

SEQ ID NO: 8629 - DNA, 302 bp, Triticum aestivum
  Clone ID: uC-tsrow189049a05b1
taaccacatcgccggctgacccatctctctccctatctctctgtctctctctctctcccaaggattccggctgtttgctgagcttgacgaagcagtttgctgcactctctggcttggaggcgaggcgtttcgagggagcgagcgagcgatttttagtatctgcgaatggcgactcagcggttctccaatatggtgatggacgagccgagtttcttccaccagtggcagtcggacgcgacgctggagcagtacacggagcagcagatcgccgtggccttcgggcagggggagatggaggcggc

SEQ ID NO: 8630 - DNA, 171 bp, Triticum aestivum
  Clone ID: uC-tsrow189049a06b1
tgctgctgctggtgtcgctggcggcggcggcggacatgtcgatcgtgtcgtacggggagcggcgcgaggaggaggtgcggcggatgtacgccgagtggatgtccgagcaccgcaggacgtacaacgccatcggcgaggaggagcgccgcttcgaggtcttcagggacaacc

SEQ ID NO: 8631 - DNA, 310 bp, Triticum aestivum
  Clone ID: uC-tsrow189049a07b1
tcggaccccaaggtgctcacggcgttcgccaacacgggcgtggagttcatcatctccgtgggcaatgagaacctgcagaccatggccagcagccccggcgcggcgcggcagtgggtcgcgcagcacgtgcagcccttcatcccggccacacgcatcaccggcatcatcgtcggcaacgaggtgctgggcaacaacgacaccaccatggcggccagcctcgtgccggccatgcaggcggtctacgacgcgctcgccgcgctcgggctcagcggccaggtgacggtctcgtcggcgcactcggtgaacgtgc

SEQ ID NO: 8632 - DNA, 386 bp, Triticum aestivum
  Clone ID: uC-tsrow189049a08b1
tttaagacaggaagtacccgagaaatccaaggattctcctggtggaccatggcaattcattggtctgttgcccctgtttgatcccccaaggcatgacagtgctgagaccatccgcaaggcacttgttcttggtgtcaacgtcaagatgatcacaggtgaccaacttgctattggaaaggagactggtaggaggcttgggatgggcacaaacatgtatccttcttctgcattgcttggccaaagcaaggatggttcacttgagtcacttcctgttgatgagctgattgagaaggctgatggatttgccggagtcttccctgagcacaagtatgagattgtgaagaggctgcaagagaagaagcacattgttggtatgactggagatg

SEQ ID NO: 8633 - DNA, 434 bp, Triticum aestivum
  unsure (1)..(434): unsure at all n locations
  Clone ID: uC-tsrow189049a09b1
tttaaaactcacgtaatgtagattcactccctttgatggagggtgaagggcgtgctttaaaagtttatggattcaatcacgttcaacgaacacaattcctacagacactcatgaggtatggttttcagaactatgattggaaagagtatcttcctcgtttgaaggggaaaagtgtcgaggaaattcagagatatggtgagcttgtcatggcccatcttgtagaggacacaaatgactcaccaacctatgcagatggtgtgccgaaggaaatgcgtgctgatgagacattggtcaggctagccaaaatatcacttgtggaggagaaggtggctgccatggagcaaggaaaaattacaaaactcttccccaactacttgttgcatgaatntactggcttatcaggtggaagaatatggaaaggggaacatgatcta

SEQ ID NO: 8634 - DNA, 276 bp, Triticum aestivum
  Clone ID: uC-tsrow189049a10b1
tagtgggccagtaatagcgtctactatcttttaagtctctggtcaaggctggtgacatctgtgccttacttgaaaggcgatacaccaagtctgcttgatgaaactgtacccaaaattacggagggttttatcacttctagaattaattctgtccaggccagctttgcggacaactcaccagacccagataatccgttagaaaatgcggaaagtctccaggatcagctggagagtcttccttatctttgcagattcaagtatgaaagctgtagcctc

SEQ ID NO: 8635 - DNA, 345 bp, Triticum aestivum
  Clone ID: uC-tsrow189049a12b1
ttttagggagccctgctgctcaaagctgctgtgtgttatggtcgctgatggtatccagatcaccggcatggcagtcgttacaatcgtgtttgctgctctgggttttctctcacctgcttccaggggaatgctcttgaccggaatgatcatcctctacctcttccttggaattattgctggatatgttggtgtccgtctctggaggaccatcaaacaatccacagaaggctggaaatctgtcgcttggctgacctcctgcttcttccctggcattgttttcatcatcttgaccgtgctgaactccatcctgtggggtaagaagagcactggagctttacccatttc

SEQ ID NO: 8636 - DNA, 369 bp, Triticum aestivum
  Clone ID: uC-tsrow189049b01b1
tacgcgtccgccacgcgtccgcggacgcgtgggcggacgcgtgggggcgacccctcagatctaccgcaaaaccctcctccccgtgctcctcctgctcgccgccgcggcgctctacccagccgccgccgacggcgacgaggtgctcgccctcacggagtccaccttcgagaaggaggtcggccaggatcgtggcgcgctcgtcgagttctacgctccctggtgtggccactgcaagaagcttgctccagaatatgagaagcttgctgcaagctttaaaaaagctaaatcagtcttgattgccaaggctgactgcgatgagcacaagagtgtgtgcagcaagtatggagtttctggctaccccacaatcca

SEQ ID NO: 8637 - DNA, 278 bp, Triticum aestivum
  Clone ID: uC-tsrow189049b02b1
tggacacgagtatcagggaggaagacgaggaaacgttgatggccggcggtgaagagctgaagctgctggggtggtgggcgcccggggtgagtccctacgtgctgcgcgcccagatggcgctcgccgtaaaggggctgagctacgactacctccccgaggaccgctggtccacgagcgacctcctcatcgcgtccaaccccgtgtacaagaaggtgcccgtcctcattcacaacggcaggcccgtctgcgagtcgctgctcatcctggagtacctcgac

SEQ ID NO: 8638 - DNA, 335 bp, Triticum aestivum
  Clone ID: uC-tsrow189049b03b1
ttgaacgcccttgccaaggcattggctggtcaaaaggatgaggcttacttctctgcaaatgctgctgctctggcctcaagaaggtcgtcaccacgtgtcacaaatgaggaggtccagaaggctgccaccgccctcaagggctctgatcaccgccgtgctaccaccgttagcgctaggttggatgcgcagcaaaagaagctcaaccttccgatccttcccacgaccaccattggttcattcccacagacagtggagctcaggagagtccgccgtgagtacaaggcaaagaagatctctgaggaggagtacaccaatgccatcaaggaggagattag

SEQ ID NO: 8639 - DNA, 353 bp, Triticum aestivum
  Clone ID: uC-tsrow189049b04b1
cgtccttttacgcgtccggatccagaccatgcaagttgaaacaactgaaaagaatgaagcacttacaagcaagatgcaggagcatgcaaacttagtccatgaaaaagatcagttggagcaacaattgctggaagttaggaaggaactggaggctgcttaccgtaccatcgctaaccaggaagagcaagcttcagtgagggagataaagtgggatgcgtttaagacgtattcagcggatcaactagaagctgcacaaaaacacgctgcagagctggaagtacaagtatcagctctaaatcagcagctgcaagaagctgagatccattacaagaaaaaggttgcaaaggagagtg

SEQ ID NO: 8640 - DNA, 321 bp, Triticum aestivum
  Clone ID: uC-tsrow189049b06b1
tggacgcgtgggcgcggccctgccgtatcccccagccgtctccgccgacgccgccatcttcgtcattagtttgaagactgatggattatgataactctagaagacacaatcaaagtacttccaaaaagaggactcgtttcaattctgatgatggaaagaggaaacggctaaactacaggcaggatggcggacatatgtcctctcagccaatagaaaccgtttacaggatattgtgcccaggaaaaaagatcggcggtgtcttggggagaggtggccatgttgctaaggcccttagagacgagactaaagcaaagatacggg

SEQ ID NO: 8641 - DNA, 275 bp, Triticum aestivum
  Clone ID: uC-tsrow189049b07b1
ttctgcccaaagcgtgtctttgaaacattagcgtcgcctacaaagacaataaagaacatgttgactgtccctagttccccttcatcacctgtcaatggtggctcagttaaggtagtgcagatgacaccagtgacttctgccatgacaactgctaagtggcttcgtggggtgatatcttcgctgccagagaagccttcgtctaaacttgagaaatttctttcgtcttgtgatacagatttgacaagtgatgtaacaaaaaggggcagcataatttt

SEQ ID NO: 8642 - DNA, 458 bp, Triticum aestivum
  Clone ID: uC-tsrow189049b08b1
gtcgactagtactacccctggcctccggctggatgcactgcatccagccctccctttccccgccttcgttctttttcttcctgctctcatctgcctgtctgcatctcccagtccatgaaccagcgatcgtagaagtcccggtcggcgctggagcactgccgatgtgcataccaagcttgatgcccaggaaaagatgctagctgatgtgccatcggcttcaccaggatttgtagattgccagatctgatctgattcagcgagaattctgagctaccaaagctgcttcgactcaaagctctaccactgccctatcttgcactttaagaagactcgatcgtcacggaaagagcagacagaggtatcaaattccatgctagctcctcatgttcttgagcgcaagaaatgagtcttccgagtcggaggacatccaagaactgatcaacagtggcctcaagtgc

SEQ ID NO: 8643 - DNA, 265 bp, Triticum aestivum
  Clone ID: uC-tsrow189049b09b1
tccacgcgtccgcacccgtctccacccagataaccacgagagatatttcgtccgccccgacgaccgacgaacggcagagaaaagtgaggtgatcatgagcaccatggcgatgtcggcgctgaacccggacgcgcccatgttcatcccggcggcgttcaagaaggtggaggactactcgcccgagtggtgggagctggtcaagaccaccgcctggttccgcgaccactggttccgccagcaccagctctacgaggacctcgccgac

SEQ ID NO: 8644 - DNA, 344 bp, Triticum aestivum
  Clone ID: uC-tsrow189049b10b1
ttcccgctaggtccagatccacgacgcagagaaaaggaaacaatccactcttcacggtcagtgcgcttggccaataatcagcttgtccatttgcagcttcctatttactgtcagtgcattcagcaacctgtcctccatgcacagttgactgaccaagctctgagctagcatggccatggaggcggctcttgtcagcgtggcgacgggggtcctcaaacccgtcataggaaagctgaccactctgctcggcaatgagtacaagcgtttcaagacagttcgcaaggagctcaagtccctcactcatgaacttgctgccatggaggcttttctcctcaagatgtctg

SEQ ID NO: 8645 - DNA, 358 bp, Triticum aestivum
  Clone ID: uC-tsrow189049b11b1
tatagttggtggtggagataatgccagtggttccactgatacaatcgtaatgaacgcttccaagtttgtctggtctgtggtcactagtgtgtcagttcgagatccacttgcttgtgagggtctcactctttgttcagccacagttgatggcgaaaagttcctaattgcctttggcggttacaacgggaagtacaacaatgagatctttgtgatgaaacccaagccaagaaactttgtgcaacctcgtcttttccaatctccagcagctgctgctgctgcagcttctgtgaaagctgcctatgctgtaataactgctactgatgagaaaactaaagatattgttgctactgatgatttg

SEQ ID NO: 8646 - DNA, 347 bp, Triticum aestivum
  Clone ID: uC-tsrow189049c01b1
tacacttctcccgtcccgtccccagccaacctcccatccccgtctcgcgtcgcagcggcagttccactccctcgccatgggcaagattaagatcggaatcaacggtttcggaaggatcgggaggctcgtcgccagggtcgccctccagagcgacgatgtcgagctcgtcgccgtcaacgacccctttatcaccaccgagtacatgacctacatgttcaagtacgacaccgttcacggccactggaagcacagtgacatcaagctcaaggacgacaagacgctgctctttggcgagaagccagttaccgtcttcggcgtcaggaaccctgaggagatcccgtggggtg

SEQ ID NO: 8647 - DNA, 91 bp, Triticum aestivum
  unsure (1)..(91): unsure at all n locations
  Clone ID: uC-tsrow189049c02b1
atcacgccgtgcgccacgccgcctccccccaaaaacctttcgaaaaccgccgcgccaaccgccacccagcccgcccctnaccacccccccc

SEQ ID NO: 8648 - DNA, 219 bp, Triticum aestivum
  Clone ID: uC-tsrow189049c04b1
ttgacgcgtggggcccttggccccgtccggcccggcgcctgctgatgatcctgcccgccgccgccggcgccgccaccgccgccggcgccgccgggggcggctgctgcatcaagatcctgccccgtccgccagcccaaccagcaccccgacgacacacgcaccaacagatcaaccgccccaaacagggcacgccgtcctcggcttcaaggccaagcaggg

SEQ ID NO: 8649 - DNA, 342 bp, Triticum aestivum
  Clone ID: uC-tsrow189049c05b1
ttgaagaacaggaagtaccttgctgctgctgtgcctgatgaagccgcccagatgctcctgctccagtctatcgaggcgttctgtggcaagtgcagcgccgaggccctgaaggagctgcctgtcgtcctgaaggccctctacgacggagacgtcctcgaggaagagactattgtgcagtggtacaatgaggctgttgctgccggcaaggactcccagatcgtgaagaatgccaagcccgtcgtggagtggctccagagcgctgagtctgacgaggagtgagaccctgtactgcttgctcccattccgcacttactttttaccaccgctacttgcttaagtgtc

SEQ ID NO: 8650 - DNA, 301 bp, Triticum aestivum
  Clone ID: uC-tsrow189049c06b1
tttagttcagctacagcaagatcctcaaagacctcaagaatgagttttgctgcaatggtacagttgtccaggacacagaacttggacaggtcattcaactccagggtgatcagaggaagaacgtctcaaacttccttgtccaggccggcattgtgaagaaggaacacatcaagattcatggtttctgagcaactgccagctccatatcagagtctacatgcaaagcagctatatattggtggtgcagtatatttagttgtgtgctagcgctagcaggcgttaccagcttgcgcgctctgag

SEQ ID NO: 8651 - DNA, 338 bp, Triticum aestivum
  Clone ID: uC-tsrow189049c07b1
cgccaacaacaataaactaaaccaattcatgatctgtcggatctgcattacaaagggcacaagttttttttccaaagccaagagtagtgttgctgttgtgcagactaaaccaatgtcactgcagttgcttattacgggtaaattggagtaaaaacgaacaaaaacaaggatccctcagcaggagctggcacactcccgctcgtgagcaagtctcgggcgaacagctgaaaacccaaaaaatttaacttgtacagggcggtggtgacacctcgccatcaagcattctcgttggcgatcttctccgccttggcgatgacttcgtcgatgcctccaaccat

SEQ ID NO: 8652 - DNA, 454 bp, Triticum aestivum
  Clone ID: uC-tsrow189049c08b1
tgagcgccgccgcttccccacctctcatctctgggcgaacccgcaaggaactatattcccagtgtgatatccaaaaccagtcaagatggtgaagtttacagcggaggagctccgcggaattatggacaagaaaaataatattcgtaacatgtctgttattgctcatgtcgaccacggcaagtctacgcttacggattcccttgtggcagctgctgggattatcgcccaggaagttgctggggatgttcgcatgactgatacccgtgcagatgaggcagagcgtggtattacaatcaaatccacgggtatctctcttttctatcagatgactcctgaatcacttgagatgtacaagggcgacagggatggagatgaatacctgatcaaccttattgattcacctggccacgttgacttttcttcggaagtcacagctgctcttcgtatcactgat

SEQ ID NO: 8653 - DNA, 410 bp, Triticum aestivum
  Clone ID: uC-tsrow189049c09b1
ttcctccgtctcctgggacaagacgctcaaggtctgggcgatcccgtccctccgctgcttgcagtcgttgccggcgcacgacgatgccgtcaacgcggtcgccgtcgcgccggacggcacggtgtacactggctccgccgacaggcgcgttcgtgtctgggcgcccaggcccgcgtccgacaagaccaccaaacgacagagcaagaagccggtttactacctggtggccaccctctcccgccacacggcggcggtgaacgccgtggccgtcgggtgcggggggcaggtgctgtactccggcggcaacgatcgctgcgtggtggcgtgggagcgggaggacagcgcgagccacatggtcgcgatcggggcgctgcgggggcaccgcaaggcggtgctctccatcgcgtgcg

SEQ ID NO: 8654 - DNA, 362 bp, Triticum aestivum
  Clone ID: uC-tsrow189049c10b1
ttcgattcccgccgcctacgccctctgccgccgcagccgttgccatgggcgcgtacaagttcgtgtcggagctatggaggaggaagcagtccgacgtgatgaggttcgtgcagcgcgtgcgttgctgggagtacagacagcagcccgccatcgtccgcatcaccaggcccacccgccccgacagggcacgccgtctcggcttcaaggccaagcaggggtatgtggtctaccgtatccgtgtgagacgtggtggcaggaagcgcccagtgcccaagggtattgtttatggcaagcccaagcaccagggtattacccaacttaagttccagaggaacaagaggtctgttgcggaggaaagagct

SEQ ID NO: 8655 - DNA, 343 bp, Triticum aestivum
  Clone ID: uC-tsrow189049c11b1
tccacgcgtccgcccacgcgtccgcccacgcgtccgcgcacttcctcccctgctagattcgtccctccaccgaccggcaaggcctctctcctgcacttccctcgcccaaggttgcaccagagaaggcggaaaacatcacagtttgcgaaatcgtggagcggtagagagagatggccgagacggtgttcgctccgtgtttggaagggatgaagcatgtcaggtcggacagcggggtcatgctcgccaagcccttccttgatgtctgcaagcaaatcttgcctgtcctggataaatttggtgctgctatggcaattgtgaagagtgatattggaggtaatatcac

SEQ ID NO: 8656 - DNA, 385 bp, Triticum aestivum
  Clone ID: uC-tsrow189049c12b1
ttcagcactgtggcctctccctcgtcctgtcggctgccaccattgctgtttgttccgggaggagctatgacgaagatgaccagccagccatatggtccttgatgtcatcggggagattgtatacatgattgatctgatcataacaagttgggtgcctaattcttgtccaagctctaagaggcttctgtctgtgttggtacatgtaacatgttgtcggttaaccaagagaattacttcaattgcctttttcacagagggcggaatgctgacttgaccaaaatgttagcaaacataacaagctggcacccaatagtgcttttaacagaacggaaggaggaaacaggaactatccctttacattttaacggaaggaggaacggaagga

SEQ ID NO: 8657 - DNA, 329 bp, Triticum aestivum
  Clone ID: uC-tsrow189049d01b1
ttcacgcgtccgatttcaaatcatcaattgtcccaacctgacaactttgcctgaaagcatgaagggccttacttctttaacatatctgtatataaagaagtgccaagaattagctgtgttgccacaaagcctagggcagctcattaccctgcaagacatttccatcatcaattgtcccaacctgacaactctgcctgaaagcatgaagggccttacttctttaacagagctttggatagaggagtgccaaggcctagctatgttgccagaatgcctaggacagatgatttccctgcaaaaaatttgcatcatcgattgccccaacctga

SEQ ID NO: 8658 - DNA, 324 bp, Triticum aestivum
  Clone ID: uC-tsrow189049d02b1
ttctgttcctattcatcatctggatcgatctcttgatttccatgccttgtgtgctctttattcagtcactgatgtggctcttgtaacatcactgagggatggcatgaatcttgtaagctacgaatatgttgcatgccagggatcaaaaaaaggagttttgatattgagtgagtttgccggtgcagcacaatcgcttggtgctggtgccattcttgtaaatccctggaatattacagaagttgcagactcaataaaacatgctttaacaatgacatctgatgagagagagaagcggcacaggcataactacgcgcatgtaacaac

SEQ ID NO: 8659 - DNA, 249 bp, Triticum aestivum
  Clone ID: uC-tsrow189049d03b1
ttatggaggaggaagcagtcggacgtgatgaggttcgtgcagcgcgtgcgttgctgggagtacaggcagcagccggccatcgtgcgcatcaccaggcccacccgccccgacagggctcgccgtctcggcttcaaggccaagcaggggtatgtggtctaccgtatccgtgtcaggcgtggtggcaggaagaggccagcgcccaagggtattgtctatggtaagcccaagcaccagggtattacccagctc

SEQ ID NO: 8660 - DNA, 383 bp, Triticum aestivum
  Clone ID: uC-tsrow189049d04b1
tccacgcgtccgcccacgcgtccgctcgcgtcgcggcggtagttccactccctcgccatgggcaagattaagatcggaatcaacggtttcggaaggatcgggaggctcgtcgccagggtagccctccagagcgacgatgtcgagctcgtcgccgtcaacgaccccttcatcaccaccgagtacatgacctacatgttcaagtacgacaccgttcacggccactggaagcacagtgacatcaagctcaaggacgacaagactctgctctttggcgagaagccagttaccgtcttcggcgtcaggaaccctgaggagatcccgcggggtgaggctggtgccgattacgttgtggagtccaccggtgtcttcactgacaaggacaa

SEQ ID NO: 8661 - DNA, 391 bp, Triticum aestivum
  Clone ID: uC-tsrow189049d05b1
ttcttgctgaaggatgaatttcctgatgttcgactcaacataatcagcaagcttgatcaagttaatcaggtcattggaattgacttgctgtcgcaatctctattgccggctattgtagaacttgcggaggataggcactggagggttcgccttgcaataattgagtacatccctctgctggctagtcagttaggtgttgggttttttgatgacaagctgggggcactttgcatgcaatggttggaagataaggttttctcgatcagagaagctgccgcaaacaacttgaagcgcctggcggaggagtttggtccagagtgggcaatgcaacatataattcctcaggtgttggagaagataaacaacccacattatctgtatcgcatgacca

SEQ ID NO: 8662 - DNA, 395 bp, Triticum aestivum
  Clone ID: uC-tsrow189049d06b1
tcataggcgaagcacgcgcggcaccgcgccaccggggagctcttcgccgtgaagatcctggaccgcggcagggtgctctctctccgcggcgccgacgaccaggtccgcagggagatcgccacgctcaccatgctcgcgcaccccaacgtcgtccgcctccacgaggttgctgctagcaaaacaaagatctatatggtgcttgagcttgtcgatggaggcgaactttttgacaggattgcaataaagagaaaactatctgaacgagaaggaaggaggctttttcagcagctaattgatggtgtcagctattgtcatggaaagggtgtctaccacagggacctcatgcctgaaaacgttcttatcgaccggaaaggcaacatcaagatctctgattt

SEQ ID NO: 8663 - DNA, 361 bp, Triticum aestivum
  Clone ID: uC-tsrow189049d07b1
tccacgcgtccggagccacctaagttgcactcccacctaactgatattcaattaggttgcagtgatataccatctagatttcctcatattgagccttctatgagtgagggtggcccatcactggcaccatggaaggatttcaagaataaaacaggttatggtggggattttcctggaagcacatctgacaagtgggagaaagctgatgttggactggtcccaccatatatgccaaatccttttatgatggaaagtattggtgcactacctataaacataccaaacagtagttcgatccagcagaatgaatttgcatcaagttctcatgagaacattcttcttcattgtgtcacagatgggc

SEQ ID NO: 8664 - DNA, 343 bp, Triticum aestivum
  Clone ID: uC-tsrow189049d08b1
ttcacgcgtccgcccacgcgtccggcctgcgggtttttataatgtggacattcctatggattcaactaaggatgtgaagaaaaaggaaaaagaactccaagcgatggaagccgagctaaacaaaagagaaaaggaactgaaaaggaaggaagaggctgcgtcgcgagctggcattgtcatagaagacaaaaactggccaccctttttccctctcattcatcacaatatttcaaatgagatacccatccatctacaaaaaatgcagtaccttgcattttcatcatttttgggaattgctctctgcctcttctttaatatcatagcgactacaactgcatggatt

SEQ ID NO: 8665 - DNA, 302 bp, Triticum aestivum
  Clone ID: uC-tsrow189049d09b1
tccacgcgtccgcccacgcgtccggcacggcccatccgtcgagatgaaccacgtgaagtcggctcttctgtgaggccaccgcgcgcaccggctcgcggcggcggcgccgcagcagctggcggccaccgcgtcgttccactccacgcctcccctgcagcggaagcgcaagacccagtggcggcacaggttcaatctttatgcaaaacgcatgagaaatagagacacaaaatgaacaatgatacggaatatgcctgagtatgcggagcagctcttcaatagttggcgtgatgaagatgagaaaa

SEQ ID NO: 8666 - DNA, 329 bp, Triticum aestivum
  Clone ID: uC-tsrow189049d10b1
tgacggacgaggggcgcgtggatggcttcagcggcggcgaccgttctcagggcatgcgagagctagcgcaggcgatacggcgccttggtgaggcctacgagcgcgtggagacagcgaagctggagcaggccgccgagatggagcgccagcgtctggacttcgcacgggagcttgagtcgcaacgcgtgcagttcttcctcaatacgcagaaggagctctcacagggcaagagccacatctctcccgctgcggctgcctcccactcccaggtaggtgccgccactgttggtggctcatctaggaggatggcgtccgtaccagattccaca

SEQ ID NO: 8667 - DNA, 389 bp, Triticum aestivum
  Clone ID: uC-tsrow189049d11b1
tctcaatgcgaggtgcaagagagcatgtgttgttctatgtctatcctgttaaatcctataggggaacgacattgtaagcttggttagtttgatgtcctacggagaagcaaaattgggcgtgcccaccgccagaagattcatctttgtactctcttctccatttatcagtgcaacgagaggcagagttagtcatggtgatgatcatattgtattcttatgatgcttgcagactgggagtgtatttatacttcatgcttatgagttatgatgaatcatttctatggcattacatacagtcagtgggaaaaggtcattagggactagcatgtttcactattgtgattacaaactaaaacttgtgcaagtatgataaatgggtgcattgatct

SEQ ID NO: 8668 - DNA, 361 bp, Triticum aestivum
  Clone ID: uC-tsrow189049d12b1
tttttcccaaccatacaggctacaggcctacagcaataccatggcggcatcagtagcctgcgccttcttcttcgaggccgagccggtgggcgagcccggcatgccggcgctagacgcgtgcgcgctctgtgccaagcggctggtgcgcgacagcgacgtcttcatgtacagaggggacacgcccttctgcagcgaggagtgccgccacgagcagatgcagctcgacgccgtctccgccaggcaggccgcccggaggctgcagcggttctcggcgggagcagagtccgggcgtgcacgccatggggtgtccgtctcgagctaaccggcgagagtgccaagcgacatacagtacgtgcctgac

SEQ ID NO: 8669 - DNA, 363 bp, Triticum aestivum
  Clone ID: uC-tsrow189049e01b1
tggagctttagcggcagctcgcgcggccgtcgatttggacgacaccggcgaccaggacctcaccggcagcagcgcatcttatccaagtttgcagatttcccctacaaaggccgaggtgggacactctgctccatcatcacaaccctgtggatcaattgccaccagtctttgggttgcaaaatctggacagagccttctgaagtttgacagtcacatcttctcaactgtacattgccgtgcaagatgccaaaaataaagaacctgtctgatgcatgtaaagtatcattttctccagatggacctatatctgaagaagcactcgagagagttcgtgcactgttagatgagatcagacctttagat

SEQ ID NO: 8670 - DNA, 306 bp, Triticum aestivum
  Clone ID: uC-tsrow189049e02b1
ttcacgcgtccggaaatggtgagtcgtcagcgcgccactcacacgcacggcctccgttgtcttaatctcgagattaaaccggaaagcaaactctaataaatcccccacccccggatcgacaaagcttcccattcctccgcatcggcaggcagcagcaaaacaacagcccaatcgagggtcactccacaccaccaccactctcttcccccaatcccctcctcctccccgaaaccctagctggaatggagcccaaatccaccacccctccgccgccgggccccgtgctgggcgcgcccgtcggctacc

SEQ ID NO: 8671 - DNA, 262 bp, Triticum aestivum
  Clone ID: uC-tsrow189049e03b1
tcacgcgtgcgctctggtttcctactgctggtgatactcaccggactccccgccgtcgtcctcgccgccaacatgaccgaggtctgcgtcaaggccgccgtcggccaccccgacacgctcggcgactgccccttctcccagagggtgctgctcacgctggaggagaagaaggtgccctaccagatgaagctcatcgacgtcagcaacaagcccgactggctcctgaagatcaatccggagggcaaggtgcctgtgtataacg

SEQ ID NO: 8672 - DNA, 309 bp, Triticum aestivum
  Clone ID: uC-tsrow189049e04b1
tccgcgcgcggacgggtgcgcttgccgggcagaggaagtcgagagggcccacgatggggacatcgggcggctgcgcgcgcaggaggggagtggcctagaaggcacaaccatcgacgggtgcagcgcagccggctgcggaaacgcgcaaggcgcagtcagcacgagacggcgggaggcggcgagcagcggggaaaatcgatgctcgtagagaggcggagcggcatagaagcggcaagccggcttgtggagtggcgatgaaggcggcctgcgagctacggcgggttgggccaaggcgaggttcagcaacgc

SEQ ID NO: 8673 - DNA, 346 bp, Triticum aestivum
  Clone ID: uC-tsrow189049e05b1
taacactcagtctgatccaccgccgccggcgctagcttgcaccaacatccacgtcacttcagttcgtaaatcatagaatgcctagcgatgatgtgccaccatggcgacattggagacatgcattgactaccagagacaaggacctactcgacacatcctctggccctctgttcatgctgccaaggagagaggagttgcttggtccaacttgtttcggcctcagatctgctacggaaaacttgttgagaccctgttgtccaacggacttgtgtcggcctgcagaagtttggtggaacgaaaatgtacacctaaatgacagtgttgttcaagttttctttttggcagg

SEQ ID NO: 8674 - DNA, 395 bp, Triticum aestivum
  Clone ID: uC-tsrow189049e06b1
ttgtcccctccgccgccgcaccacgggccctgctcctccgccgccgggtactactacaaccaccaccacccgccgcccccgcacgcgtaccacggcccgtggcaccccgcgccccagccgccgccgtcgcagatgcccgcgctcaccggccccccgcccgagttcgtcggccaccagcaggcgctcaaggtgaagaacgacatcaacctgcgcaaggacaccatccgcctcgtgcccgacgccgccgaccctgaccgccgcctcgtctccttcaccttcgacgcggtcaccgacggcagtttagttatacattactttgccaaggaaggaaaagactgcaatttttcttcagtgtacccagacttgcagacaccaacaaagatacctttccagaa

SEQ ID NO: 8675 - DNA, 395 bp, Triticum aestivum
  Clone ID: uC-tsrow189049e07b1
gttgccctctctcctttatcccgtctttggccccgccctcgccaactcccgacgctccgccgagtggagaaccaggaaggaggagggacgtgaagtggagaagagggggtgcgctggagaaggagccaagcctgcaggagagcacggagtgccggcgcgccgtgcccgccgcagctgctcgtggagatccggcatgtgctgcaccatggaggcgctcgtggagggtttgatgtcgaggaggttcggttcctacaccaatggttacagcgggctctgctgcagggagtggaagttttagaatgctgcggacaggttgagagcaatagatgttttttaagtcctaggacaatttgattttgggaggacaaaggtcaggcaaggatgagaatgggata

SEQ ID NO: 8676 - DNA, 270 bp, Triticum aestivum
  Clone ID: uC-tsrow189049e08b1
tttcacgcgtccgcccacgcgtccgcttaaatcagctgatggaagaaggcatcaaagaagccgagtcgagcaagaaagcagcagcagccgagagcacagcgaccaaagtgggcgtcatggccgactcgacgttcgggagcatcggcgacgtgctcaaactgctgccgacgtcgacggtgatcgtgtacgaggtgctcaacccgatcgtgaccaacgccggcgcgtgcagcgtggccaacagggtggtcaccgcggcgctcctcgtgctct

SEQ ID NO: 8677 - DNA, 345 bp, Triticum aestivum
  Clone ID: uC-tsrow189049e09b1
ttcgtctctgccgatacttcacacaagaaagatgagatcgccggcaactcttccactactatcttccgatcgtttggtcgccatggcgccgtgacctcgccgtgcttcagcgatggccccgcgctggacctctgatgaccagacaagacggaccgaccgcaccgtgactccgacagccactccgtggtggtaatcagtggagtgccgccaccgtcgatcaaaatctttgacctcccgcatccaccgccagttctgtctccctgcaagcaaatctcagccgccattgctcagcttctgagcagcggagcggatccgagatggagcccatccctctgctcacgccgt

SEQ ID NO: 8678 - DNA, 422 bp, Triticum aestivum
  Clone ID: uC-tsrow189049e10b1
tgtctcacgcgtccgcccacgcgtccggcagctcacaacctgctcatacttaatactacttgctgcagttattcagatattcagagttccctacatacttgctgcagtttcagaaaaatgcttaatgtcagagttgattctctgctcgctgctctgtgtcatctgcacagattagttacatgcttgtaggacaacacatggaaatttacatctggcttgtctgtactaaccattgaaaacaagcaacacctgaaacaaatatgcaattttactatgcatatgctcatctcgttatattcagagttcaatatatacttgctgcagatacagaaagtgcttcatgttagagttcagtatatgtatcatctgcacaaattggtttcctattcagattatatgcatctgctaggctttattatgta

SEQ ID NO: 8679 - DNA, 238 bp, Triticum aestivum
  Clone ID: uC-tsrow189049e11b1
ttcgcgtctgctacacttcctctcccggcccggctagatctcgccggcaggagatggcggacgcgaagcagcagcaggccgcggcgcccaccggcgtctggaagacgatcaagccattcgtcaatggcggtgcctccgggatgctcgccacctgcgtcatccagcccatcgacatgatcaaggtgaagatccagttgggtgagggatctgcagctcaggtcgcaaagaccatgtatgc

SEQ ID NO: 8680 - DNA, 302 bp, Triticum aestivum
  Clone ID: uC-tsrow189049e12b1
tggtgtgccaggtttctctgtctgggctcccggcatcggtggcggcgcggcggcgggcgggcattgggagggagctcacggcggcaagcggcggcaggcggagcgggcgcgggagctctccggcggccatgccgcgatccggggcgtgatcccgccggggattgctggcccgggagggccgcggcgatgaacggcgcgagcgccggctccggctccggcggcgaggggccgctggtgtaccaggcctggaaagggaacaatgtgtttttcctccaggggaggtttatatttggacctgatgc

SEQ ID NO: 8681 - DNA, 279 bp, Triticum aestivum
  Clone ID: uC-tsrow189049f01b1
taaaccgatgcctttatggttgctagaggtgatcttggaatggagattccagtcgagaagatattccttgcacagaaaatgatgatctacaagtgcaaccttgctgggaagcctgtggtcacagcgacacagatgctcgagtccatgatcaagtcccccaggccaacccgcgctgaggctactgatgttgcaaatgctgtgctcgatggaactgattgcgtcatgctcagtggcgaaagcgctgctggagcataccctgaggtggctgtgaagatcatg

SEQ ID NO: 8682 - DNA, 349 bp, Triticum aestivum
  Clone ID: uC-tsrow189049f02b1
ttgtagcaccacaaaatggtgtcgccaaggctgggaacaacaatcaggacttcttttctggtaacttcggttttggttcgccgggcaagccagcaaatggggccacaaccgcaggtgctaacaagagcgcatccacccctacctcttctaccctgccctctcaatcaggcaaagagtacgatttttcctcattaacgcaaggaatgttctcgaagcgatgagtggcttgcaatacttggaaatggatgaggcctccattgggcgcagatttagggagaagctggggggaagcttgtacactgttttaccgaggcagctctgccaattgtggatacatagttacatcacc

SEQ ID NO: 8683 - DNA, 361 bp, Triticum aestivum
  Clone ID: uC-tsrow189049f04b1
ttgacgcgtgggccgagggtgcgtggcgtgtgcgtgtgcgtgcggcgatacgacacacgggactcacgcgcggcggcggcggcggcggcgagcgagggttttgcctgctgctcccccgacgcggcggcggcgggagtagccgtcggatccggagggaggggcctgcagcgccatgaggggcggcggccggggaggagggggaggcgggggcggcgggagggggcagcgggaacagcaggcccgcggcgcggcggcggcggtggcgggggacggggcggagatcccggcggcctcgcggaagctcgtgcaggggctcaaggggatcctcgccgaccgcaccgaggccgagatctacgccacg

SEQ ID NO: 8684 - DNA, 419 bp, Triticum aestivum
  Clone ID: uC-tsrow189049f05b1
ttcacgcgtccgctcacgcgcaacgttagtgccgctccccctccctgcgaaaccctaaccctagccaccatcagcgcgctccctccctcgatcctcatgtccgattccgaagcatccccgacgcccgcggttgcggtcgcggcggtggaggtggcggcgggcgagaactccccgactccggcgaggagtgaggagctgctgccggtggcggagaagatctcggaactaaatgaatcacagtcagagctcccgggaagacttcgaggccttaaggaggatttgcagagctggagaagcaatttagacacccaagtgcagaaatacaaaactgaaatctccgatatcaaaactgcacttaatagtgaaatagaccagctgaaatcagatttccaagaactgaggaccacccttaagaagca

SEQ ID NO: 8685 - DNA, 474 bp, Triticum aestivum
  Clone ID: uC-tsrow189049f06b1
ttcaagcacacgcaacacgcatcccccatagccggaacgagctccgcttctccttgttcccgcggcggcggaacacatcgagatggccaagtacgtggagatgctggacatgggcgtgcgcatcgccgccaggttccactcccactgcccgcagacggcgcgcatgtactacaagccgccgcagtccgcctccacgtcgggcgccgccgaggccgccacgacggatcggacgaaggcggccggctttgacggcggcgaggacgtggctgctggcttccggcccttcgccgcctcgggagctctcggcgccggcgtccagccgcggttcggcttcgacaccgcgcaggtcgtcatctacgaggtcgtatgaggctgggaacaacgagggcgggctcttctgggaagagatctctcggatgaggatagttctgcgaccgaggaattggtcgattataacaccattctttaattagt

SEQ ID NO: 8686 - DNA, 289 bp, Triticum aestivum
  Clone ID: uC-tsrow189049f07b1
tttacgcgttcgacaccccagaaatctcacccgcctccacccagaaggaaaatcgcgagagatatttcgtcccggacgcgtccgccccgacgacagacgaacagcagagaaaagtgaggtgatcatgagcaccatggcgatgtctgcgctgaacccggacgcgcccatgttcatcccggcggcgttcaagaaggtggaggactactcgcccgagtggtgggagctggtcaaaaccaccgcctggttccgcgaccactggttccgccagcaccagctctacgaggacctc

SEQ ID NO: 8687 - DNA, 196 bp, Triticum aestivum
  Clone ID: uC-tsrow189049f08b1
tgatcgattattagcgcatttaccggtgctagattactgtaaataagcccgcgagggatcgagctagcaccgttaattagcttcattgtggtgtgatctgtatagttgtagattaatcagcagtgtggtgatttgggggtgtaattagcattattgtattgggatccatcgacatactagtatatttcattatcaa

SEQ ID NO: 8688 - DNA, 365 bp, Triticum aestivum
  Clone ID: uC-tsrow189049f09b1
tatcagctctctttcttccttcttcctccccaactcctccgccctctcgacctcatcgcccaccacccacgcaagcgcctggatcgccgccggtcccgaccatggatccctacaagcaccggccgacgagcggggccaactccggctactggaccaccaactccggcgcgcccgtctggaacaacaacaacgccctcaccgtcgggcagcgaggacctatcctccttgaggattaccatctgattgaaaagcttgcgcagtttgaccgggagcgtatccctgaacgtgttgttcatgcacggtgagccagtgcaaagggattctttgaggtgactcatgatgtttctcagctcacatgtgctgac

SEQ ID NO: 8689 - DNA, 399 bp, Triticum aestivum
  Clone ID: uC-tsrow189049f10b1
ttctgatctgaccggtcgcgccaaaccgagctctagcatcagctcgtcggagttcgcaccggtcgactcagaactcttcaccaatggccgccgtccaggtccaagccgcaacccacgccatgcccgtcgaggaggctccggcgccggcggcggtggaggctgtcgagacggccgcggtggcggtggaggctgtcgagccggccgtcgtcgttgtcgaggagactacggtggcagcggtggagattgtcgagccggctgtcgccacagtcgaggtggcagcggtggaggctgtcgagccggccgttgtcgctccccaggaggccgtgaaggaggaagctgctgcaccggccgtgaccgagctggcgaaagagccggaggcagttccagcagagaccaaag

SEQ ID NO: 8690 - DNA, 405 bp, Triticum aestivum
  Clone ID: uC-tsrow189049f11b1
ttcgcaagggagataagatttcatcagctgcgactggtcgcacatatgaagtctttgatgttggcattatgcatcctgagcttacccctactggagtgctttacactggacaagttggatatgttataactggaatgcgttcaactaaagaagcacggattggtgatactcttcatcaggctaagactatcgttgaaccacttcctggtttcaagcctgtgagacacatggtcttctctggtgtatacccagctgatggttctgactttgaggctcttagccatgcaattgagaagctaacatgtaatgatgccagtgtgtctgttacaaaagagacaagcactgcacttggcatgggcttcagatgtggtttcctaggattgctgcacatggatgtgtttcatc

SEQ ID NO: 8691 - DNA, 312 bp, Triticum aestivum
  Clone ID: uC-tsrow189049f12b1
ttccaatctttcatcatccatctctcccaagagtcagcatggcttcaccttcagctctgaaggttctcgccttcgtctgcatcgtggcgctggtcggcctcaacctgagccagccggcgtcggcggcgagctgtgccgactgctggtacgacggatggtgtgatcgtttgtgcggtcttattgaatacgggtgccatgcgtgcgaacgcatacaaatgagagggtgctcgcccaggtgctaccagggttgccttgcaacctgcaggagcgtagatgcatcgtccggatcgatgtctgcctagagcgtgcgtg

SEQ ID NO: 8692 - DNA, 298 bp, Triticum aestivum
  Clone ID: uC-tsrow189049g01b1
ggcacaagctaaacacgagaaatttactacaattgcaccaacattggtgcaagcatgcagtacatagctaaatatcatcatctcagagggaacctatgtcgatgttgcgagcctgcaacaacagctatagctccctgcatctcttgcggttcatctcatggttgctgcttgattctgctacatagcagctacacaagatcttctagtggtagatcaccggaaacaaaaaggtttcttacaaatggcgctgatggaaccacctgaaggaatcaaagaatcggagcaacagcaacaagat

SEQ ID NO: 8693 - DNA, 347 bp, Triticum aestivum
  Clone ID: uC-tsrow189049g02b1
ttttcgaagaagacaaaaatttccatgttgttctcaattctgttattgctggtcgttaccatgtcacggagtatttgggatcagcagcgttcagcaaagctatccaggcacatgatttacacacaggaatggacgtgtgtgttaaaatcattaagaacaacaaagattttttcgaccagagccttgatgagatcaagcttctgaaatatgtaaacaagcatgaccctgcggacaagtaccaccttctgcgtctatatgattacttctactatcgggaacatttgttgatagtttgtgaacttctgaaggcaaatttgtatgaatttcaaaagtttaacagagaatca

SEQ ID NO: 8694 - DNA, 275 bp, Triticum aestivum
  Clone ID: uC-tsrow189049g03b1
tccggcgtcagtcgccgtcgtcgtcctctgcatcgccgtgggcgcgctgctgttcttttcttcagaacgagcagttgcccgcttgcctgcatcttcgttgaccgagcacgatgccttagcactcacgtttgggccgcttctactccggtccagctgcctgcctcatccagcgcccccgtgggccttaggcaggccggacaaccgcgcctctcctctgcttcctgccgggctgaagcccatggtccgtcgggcgatgatgtctgcgcgacgaggac

SEQ ID NO: 8695 - DNA, 380 bp, Triticum aestivum
  Clone ID: uC-tsrow189049g05b1
tttcgcgtccgaagctcaactcaccagcttaattaccttgacagacattgttaggtcttgtgttagtgaagctagctaggtaagaaaaaccatggcggcttcccgtgccttggctgcactgcttgctgtggtggtactcatggtctgctctccggcgcctcgtgttctcgccactgaccccacccagctccaagacttctgcgttgctgatataatgaaccctgtgattgtgaatgggttcgtgtgcaagaacatgaagatggtgacggcgaacgacttcttcttgcccgggcttaacaagccgggcatgttgaacgctcagggctcggcggtgacaccggtgacggtgcggcagctgccggggctgaacacgctgggca

SEQ ID NO: 8696 - DNA, 328 bp, Triticum aestivum
  Clone ID: uC-tsrow189049g07b1
gtcacacgcacgcgtttgacattttccgcccaccaccgccggagggagctccagccatggccgccaagtgctacccgacggtcagcgacgagtacctggccgccgtcgccaaggccaagcgcaagctccgcggcttcatcgccgagaagaactgcgcgccccttatgctccgcctcgcgtggcactcggccgggaccttcgacgtggccaccaagaccggcgggcccttcggcaccatgaagtgccccgcggagctcgcgcacggcgccaacgccggcctcgacatcgccgtcaggctgctcgagcccatcaaggagcagttccccat

SEQ ID NO: 8697 - DNA, 324 bp, Triticum aestivum
  Clone ID: uC-tsrow189049g08b1
ttccgccccggccctccgcctctgcctccctatctcgcccccggccgcagcagcctcgtcgtcgcccccctccttcgccgtcggacgagtttccctccgccgtcgccgtcgccgtcgccgccgcgcttccttcagcggctgccgctgctcctcgtcctcccactcagaaatggaggccggcgctgggacagctctgtaccccgcgcaccgatgcaaaaccatatacctggtgaggcatgcccagggtattcacaacgtggagggcgagaaggattttgcagcatacaagtcacatgcgctgcttgatgctcaacttaccccttt

SEQ ID NO: 8698 - DNA, 321 bp, Triticum aestivum
  Clone ID: uC-tsrow189049g09b1
ttttcacgcgtccgcccgcaaccaaaaactaccccaaaaaaattcgcaaaaccaaaaaaatcccccgaggcccggcgggatctgctcctcctccccgctatataccgatcgaggagatagggtttagcgccgattcgccgggggggaaaatcgaaaaaaaaggaggaggaatcgcgatggcagcgcaggtggcggtggcgaacggcggcggcgcggctccggcggtgccggcggcggccgtggtccccgcgcccgtggccgcggcggccggaggggtcacgcagccgctcccgaccacgtcgctctacgtcggcgacctcg

SEQ ID NO: 8699 - DNA, 365 bp, Triticum aestivum
  Clone ID: uC-tsrow189049g10b1
tgtctttgctccgctcccctcctctctctcctccatcctccggtttctgatcgcgaccatgggaacccgcgggctcgccgtgctgctcctcgcggcggtgctgctgcagggcctcctcccggcctcggaggcggagggcctggtgcggatcgcgctgaagaagcgcgccatcgaccggaacagccgcgtcgccaagagcctctccgaccgcgaggaggtgcacctcctcggcggcgcctccaacaccctcccctccgaggaggagggcgacatcgtgtccctcaagaactacatgaacgcgcagtacttcggggagatcggcgtcggcacgccgccgcagaagttcaccgtcatcttcgacaccg

SEQ ID NO: 8700 - DNA, 341 bp, Triticum aestivum
  Clone ID: uC-tsrow189049g12b1
ttggaggttttgcacagagcattaccccttgggcggcatatttttccgacaccttcatccgtaggaagttggaaaactacggcaaaattcggtgcaagttacatctgaagttcatggtaaatgcttcacccttccattatggaagtttgcgtgcgtgctatttccctatgggggatgcgcgctcaacattcgtgaattcagcagatttgcttccattctcgcagacaccaggtgtgtatatcgagccgcagaatatgacatctgcggagcttgttttgccttttgtttggcaacacaactggcttgagatcactaagcttagtgattttcagcgtatgggc

SEQ ID NO: 8701 - DNA, 268 bp, Triticum aestivum
  Clone ID: uC-tsrow189049h01b1
ttcaatcaagtctttcatcttcgacggccgagcttacagcatcacgaaggatgtcttgcagctgtggatcaagctgcggctgcggctcaaactgcaactgcggcaagatgtaccctgacttggagaagagcggcgccaccgtgcaggccaccgccgtcgtcctcggcgtcgggcctgcgaaggtgcagttcgaggaggccgccgagtccggtgaggccgaccacggctgtagctgtggcgccagctgcaagtgcgacccttgcaactg

SEQ ID NO: 8702 - DNA, 414 bp, Triticum aestivum
  Clone ID: uC-tsrow189049h02b1
tttcgttccacagtccactccacttcccatttatccagctagccttcccacctcctccattccaagaagcagagcagagcagagtaaaaatggcgatgccgcgggccgtgtccttatcggtcgccgtgctcctggcgctcctggcgtcggcggagtcgtggctgtacgaggagttcaccacggacggcaacgtgcgcgccgactacaacgcgcaggggcagcaggtggcgtcgctcgtcctcacccagcagtccggcggcggcgccttcggctcccggcaaaagtacctctacggccagttcagcatccagatgaagctcgtccccggcaactccgccggcaccgtcacctccttctacctgtcgtcgggcgacggccccgggcacgacgagatcgacatggagttcatgggca

SEQ ID NO: 8703 - DNA, 283 bp, Triticum aestivum
  Clone ID: uC-tsrow189049h03b1
tcatctcacggaaacaaacaggggaaaaccatccagagagcttcacccagcgcgcgatggggaagaagaaggagcggtcagtgaatgtgtcgggcaagcccagtcactgtctcgacgtgaaccagccccaatgacaagaagggtgctggcggcggcggcggcgccggcaggagccggtccgcggccacggtgcggcggctcaagatgtacaaactaaggcccatgagggaccgcggtgggaagatcgtcaagcacgacctccagtccaaggagctccccaaca

SEQ ID NO: 8704 - DNA, 402 bp, Triticum aestivum
  Clone ID: uC-tsrow189049h04b1
gtcttgagcaatatgtggactatgcattagacgtcccaatgtattttgtataccggaacaagaattacattgactgtaccggaatgtcatttcgggattttatggcaggaaagctcccacaggtcccaggggagttgcccactttgaacgattgggagaaccatctaacaacaatttttcccgaggttaggctgaagagatacatggagatgagaggtgctgatggtggaccttggaggagattgtgtgctttgcctgcattttgggttggtttgttgtatgacgacgaatcactacagagcattattgacatgactgctgactggacaaaggaagaaagagagatgttgagacggaaggtcccagtaactggtttgaagacaccattccgggatgggtatg

SEQ ID NO: 8705 - DNA, 302 bp, Triticum aestivum
  Clone ID: uC-tsrow189049h05b1
gttctccttaccggaggtgcgcctgcggtggcggagttcgtcggcggctgcgcgatgctacgggccgtgtgtcggtctatggaattgcgcggcgcggcgaggaggccgtggtggtcgaggcagcacagtgaggaggccgtggaggaccttcgtggtcgcggcttcaacgacacacagtggcatggcggcatggaggtactgcgctgcggctgaggccacatcggtgcagggcaataagccgtggcggcgaggcgggcgcgaccggtgcgtgttatgggtgcatactggacgcgtcgggcaca

SEQ ID NO: 8706 - DNA, 358 bp, Triticum aestivum
  Clone ID: uC-tsrow189049h06b1
ttcacgcgtacggcagccacacgtaccggcgttgatcacattagcttgcttagcatcaccacctggtcttagaatggcgggctactacaacggcggcaggaccatgccctactccaacaccgacgagtgcttggacggcggcaggaccatgtactccaacaccaccgacgactgctacgacgctggcaagcacggccacgggcacgggcacggacatggccatggcggggcaaacatgtacgctaacaccactgacgtggagtgtttccaggactccggcaggcacggctacggtggtggcggcaggaccatgtactccaacaccgtcgacgaggagtgcttcgactccggcaggcac

SEQ ID NO: 8707 - DNA, 280 bp, Triticum aestivum
  Clone ID: uC-tsrow189049h07b1
ttcacgccgccgtctaccctacgttcgttctttttcttctggttgggtagttgacgtctacccaccagccatgggtaaggagaagactcacatcaacatcgtggtcattggccacgtcgactatggtaagtcgacgaccactgggcacctgatctacaagcttggcggcattgacaagcgtgtcatcaagaggttcgagaaggaagccgctgaaatgaacaagaggtgtttcaagtacgcctgggtgcttgacaagctcaaggcctagcgtgagagaggt

SEQ ID NO: 8708 - DNA, 313 bp, Triticum aestivum
  Clone ID: uC-tsrow189049h08b1
ttacagcattactcccttaatgtccctttagatgatggtattgatgacgaaagctaccagtccctgtttaagcctataatggccaaagttatggaggttttccagcctggtgcggttgttcttcaatgtggcgccgattctttatctggggataggttgggttgcttcaatctttcgatcagaggtcatgcagaatgcgtgaagtacatgaggtctttcaatgttgcattgatgcttcttggcggtggtggctataccataagaaatgtcgcacgatgttggtgttatgagacaggagttgcacttggccaag

SEQ ID NO: 8709 - DNA, 322 bp, Triticum aestivum
  Clone ID: uC-tsrow189049h09b1
ttcattcctcctaccacctcggcaccaccagcccaagcagagccatggcgcccaacggagacaacaccgtggccaacgtccacagcggcatcgacagcaccaacaagacgctgctcaagagcgacgccctctacacctacattctcgacaccaccgtcttcccccgtgagcacgagtgcatgcgcgacctgcgcctcatcaccgacaagcacccatggggctacatgcagtcgtcgtcggacgaggcacagctgctggggatgctgatcaagatggcgggcgccaagaagacgatcgaggtgggcgtgttcacgggctactc

SEQ ID NO: 8710 - DNA, 238 bp, Triticum aestivum
  Clone ID: uC-tsrow189049h10b1
tctcccgcgcctacacgcacgactggaccgagtgccccttcgcccaccccggcgagaacgcgcgccgccgcgacccgcgccgcgtgccctactcctgcgtcccctgccccgacttccgccgcgacccgcaagcctgccgcaagggcgacgcctgcgagtacgcgcacggcgtcttcgagtcctggctccacccggcgcagtaccgcaccaggctctgcaaggacgaggtcggatgccc

SEQ ID NO: 8711 - DNA, 350 bp, Triticum aestivum
  Clone ID: uC-tsrow189049h11b1
tctcatttctctcctcctcctcctgccaccgatcccgatccagggaggaacccggcgcgaggcgggcaaaggaagagaagaggagatcaccgagcccagcgcgcgcacaggacagcaggcgccgcgatctcgcgcaggagcggagatggggctcacgttcacgaagctgttcagccggctcttcgccaagaaggagatgaggatcctcatggtcggtctcgatgcggctggtaagaccaccatcctctacaagctcaagctcggagagatcgtcaccaccatccccacaatcgggtttaatgtcgaaactgtagagtacaagaacattagtttcaccgtttgggatgtcg

SEQ ID NO: 8712 - DNA, 416 bp, Triticum aestivum
  Clone ID: uC-tsrow189049h12b1
tttcactgccacttcaccgctccccccctttccccactcttctccaacccccggacggaggtgctgccggagcccggaagtgatcggaagcctgcagtatgggcaatctgtgctgctgtgttcaagtcgaccagtctaccgtggccatcagggagcagtttgggaagtttgacagtgtgcttgagccaggatgccactgcctgccttggatctttgggaaacgtgtagttggccatctcacactcaggttgcagcagctggatgtgcgctgtgaaactaagacaaaggacaatgtgttcgtcactgttgttgcatcgattcagtaccgacctctggctggcaaagaaagtgacgcatactacatactgaccaacacatgatcccagattcaagcctatgtctttgatgtgatcagg

SEQ ID NO: 8713 - DNA, 434 bp, Triticum aestivum
  Clone ID: uC-tsrow189050a02b1
ctctcttagtccgcgctctgcactctacactcgacaactagctactctactactcttcagtcatcacctacttcagaccaccaacacacagagagatcatggcgggtgcggcgaaggcgtcttggatggtggcgatgagtgtgggcgccgtggaggccctcaaggaccaggtcggcctctgccgctggaactacgccctcaaatccatccaccgggcagccaacgtccgcggcggcgtcttgcagggcgccaagcagcttccggcctctgctgaggcggcggccgagaagcggcgaggggagaaggccgtggaagggctgaggacggtgatgtacctcagctgctggggtcccaattagaagctgcaacttggtactagctaggcgtgtgtgtgtttgctgcaacaaccatggcctggaaccacgatgtaaaaa

SEQ ID NO: 8714 - DNA, 483 bp, Triticum aestivum
  Clone ID: uC-tsrow189050a03b1
ggtgttccggggctgtacggggagcagcgtaccgcgtacgtacgcgcatcccaccggctacacgggccaccgccgcgggtacagggtgtcagcgcgggcgggcgggcccttttctgtcgctctttctggtgcgggccttcaatgcgtcgtcctggtggctgctgatatccatccgccctcccggactcctcggccgatcagattcggttctgttactcgagttcgccgcggaaagaggggaggagataagagggaggagggttggggcctgagccgggaaggcaggcattctgatccggattcagctcctgcaacctctcagccgtctcgaggaaggatacttgagaagccaggctgctgcggttttttttttcttcaacaagtttcagggatctgtttgagactgaacagacccttgacctctttgtgcaacactcattttttgtacaacttgtggcaagaatttggcagcaaatgggtcga

SEQ ID NO: 8715 - DNA, 299 bp, Triticum aestivum
  Clone ID: uC-tsrow189050a04b1
ctgttgactcagctcgaccgaccacaactgtgcgcagcagcggcggccggcggagaccgtatcgtaccatggcgatggagggctacgaccgcgagttctggcagttcggcgaccagctcctgctccagacggccaccttctccggcctctccctcggcgactccatgtggtaccacgccgacgccgtcccccgagcccgcaacgccgaccccggcctcttatccccctcccaggcggtccacaacaacgccggaaccggattcgccgtcgccaagatgaacggcagcctcaacgggccc

SEQ ID NO: 8716 - DNA, 355 bp, Triticum aestivum
  Clone ID: uC-tsrow189050a05b1
gtttctttggcacatcctttgtcagccaagctgatgctgcgcccctgcattatcccgtggagaagcgcaccatcttatcacgtgcacgtggtgagcttggcctcagagttttccttaaaatgatccgtctagccagggcaatgagctgcatgtcaggatttatatttctcaagcactcccaccactgcccaagagcaggctgtcgccaatgctatcccaaatcctttccaagacaccaggataaatcaagtcagacaattccaacacttgccacgggaacagcagcagcgtccaccacccctggccggacagcaatactacgcacaaggtcagggttcatatggagagcagcaac

SEQ ID NO: 8717 - DNA, 362 bp, Triticum aestivum
  Clone ID: uC-tsrow189050a06b1
gtttactgcaagagcggcagcgccaccaactcaggcgccgccaacggccactactagaagcaataccactactattaactcccgattgaagcgccttcataaatcaccttagctaatgagtccatgaatgatgtgcgtacgctgggcacccagggctgctgtgcactgtcgcgtctacttgagcgctctactacccttgaaagacctgatcttcatcttgtctcctttatgcctaccgtgcgtacggccgctactgtcaatcagacggataaccgcgaccctggttggcgaatccgcgaccctggttggcggatcactggtgttcttggctttctggaagaactatgacagtccaaagggga

SEQ ID NO: 8718 - DNA, 459 bp, Triticum aestivum
  Clone ID: uC-tsrow189050a07b1
ttttcgcgtgggcggagacttcattctgtgcaccggaactctggcttggctgtggctggattagcagcagacggtaggcagatagtctcaagagcaaagtcagaagcagccaattatgaaaaggtatacggagaacccatgcctgtaaaggaattagctgatcgcgttgctagctatgttcatctgtgtacactctactggtggctcaggccttttggctgtggagttattcttggaggctatgatagggatgggccacagctctacatgatcgaaccttcaggcctctcctataaatattttggtgctgctctgggtaaaggaagacaagctgcaaagacggagattgagaaattgaagctctctgagctaacctgcagggaaggcatcgttgaggttgccaagataatttatggtgtacacgacgaagcgaaagacaaatctgttgagctggaactg

SEQ ID NO: 8719 - DNA, 444 bp, Triticum aestivum
  Clone ID: uC-tsrow189050a08b1
ttgtggaggagctgatgaaggtgcagttagaagcaacagcaaaatcagagcagctcggagaggttcatggagcatggttgccaccttggttagcagcacatgcagctcactatatggagttgatgtcaagtcactggagtgaacatggaaaacctgctgtcaacaatttattgcaaaaggcatcagagaaaacagtgcaggcgaaggaatgggctgaaccccatatagaaactgctaaggcgaaatggattcctgtcattaaagaaaattgggctactgcaaaggaaattgcagaaccttatgtgcaaatggtctcagcaaaatcagtagagctttatcaagcatcaaaggatgctatctcacctcatgttgtgaaagcacatgagcttgctgatccctatttccaggaagccaagaagttatccaaaccttatattgatcaag

SEQ ID NO: 8720 - DNA, 313 bp, Triticum aestivum
  Clone ID: uC-tsrow189050a09b1
tgtgttgatcgcctgcgccgtccttgtcgccgtctgcgccaccgtggccctggccgtcgacacgccggccatggccccggcccccggcgccgacatcgccggctccgtcgcctacttcgtcccggccgtcggcgccgtgctcggggccaccgtgctctccttcttcgactactacctgcagtaagcgcgccccggcccgagtcagttcgctgcgaggaggaggaaggcaggaagaagaagatcactaaattcgatatgtatggctctacgctacgctgattcaaggcgcgcgcgtgcgttttgatcgatgcat

SEQ ID NO: 8721 - DNA, 381 bp, Triticum aestivum
  Clone ID: uC-tsrow189050a10b1
tcgacttgctagccatggcatcttccaagagtagtcttgctatgtttgcactggccatagtcatggccgtggtggctgacgtctcggcgcagaacaccccgcaggacttcgtcaacctgcacaaccgcgcccgcgccgtgtacggcgtcggccccgtggcatgggacaacaacgtggccaggtttgcgcaggactgggcggcgcagcgcgccggcgattgccggctgcagcactccggcgggccgttcggcgagaacatcttctggggttccgggcagtcgtggacggccgccgacgcggtgaagctgtgggtggacgagaagcagaactaccatcttgacagcaacacctgcgacgccggcaaggtgtgcgggcactaca

SEQ ID NO: 8722 - DNA, 218 bp, Triticum aestivum
  Clone ID: uC-tsrow189050a12b1
tcggttggttcatcgcaatgtatgctactctagctagtcgtgacgtggattgttgcttaatcccagagtctccattctaccttgaagggaaaggaggcctccttgagttcgtcgagagacggctcaaggacagtggtcatatggtcattgcggtggccgagggtgctggccaagatctcatcgcccaaagcatgaactttgtggacactcaggatgct

SEQ ID NO: 8723 - DNA, 410 bp, Triticum aestivum
  Clone ID: uC-tsrow189050b02b1
gggtgtgtcaccgccagcgctacgaccgacgcgacgccaccatgctggtcaagtacccgattatggatctgtcgatcacgcgcgactgcttcgcgatctgcggcggcggcggctcgctcaagtcgggcatccgcaacactgtggacatttacgagctctcggacacggacccgagcgggttcgagaagaccatcacggccgacacggggctcgagctggcctcgggcgtggcgttctcccatgatggccaactcattgccgtgtctgtgaacgcgtcgtgctggatctacgcgctggaccgcgaggcgaaaacgctcacgctgctggtcaagttccgctcggactttgccgacatcgagagttcccagacgtcagtgtgctttgtgggcaacagcacgctgctcacgggc

SEQ ID NO: 8724 - DNA, 403 bp, Triticum aestivum
  Clone ID: uC-tsrow189050b04b1
ccttcattgcctccgctcccacgccgccgaatccgagacctgatctcggattcaccgcgaccagaccctcaggcgatccccggcacctactccccgacgcttcagccatggcaggaatggcaccggaaggttcccagtttgacgctaagaactatgattctaagatgcaggagctgctgaaccaaggtgagactgaggagttcttcacctcttatgatgaagttcacgagagctttgatgacatgggtctccaagagaacctcctgaggggaatttatgcttatggttttgagaagccttctgccatccagcaaaggggaatcgttcctttctgcaagggccttgatgttatccagcaagcacaatctggaacaggaaagactgctactttctgttctggaat

SEQ ID NO: 8725 - DNA, 387 bp, Triticum aestivum
  Clone ID: uC-tsrow189050b06b1
cttacgcgtccgggattcctgctccgcctcccccgccggggcggcggcggcggcggctgcgcctgctgctggtgctgctgccgccacggaccggtacacgttcaggccggggctgcggtggcagccggaagtggatgagtacttcgcctcggcgtacggccgcgagcacttcgcccgcatctcccaagccctcgcgcatccttcttgctactcttgcatccgtgtgaatactctaaagtctagcactgatactgtcatgcaaaagctgctgaaattggtaaatgagaatgaactttcttgtggatttaatggtttgaagatcggtgagcagaatggtggagagcaagcacatgaagggagttacctggtgcacaaatgcccatattc

SEQ ID NO: 8726 - DNA, 289 bp, Triticum aestivum
  Clone ID: uC-tsrow189050b07b1
ttttgcgtccgctgacctatgagcagaggaaggccagcctcgttgaaaggctcaacgccctcaacaactctgcgggtgccgccgatgacgatgaggacgacgacgagtgaagagctctttgtccaccccagtgtagtcttgcaacgtgcgtttttgttaaagtccggcactctgcacaatgacctgttccattgagttctgtttgtcctgctggagttatagattgtgttatctgggttatgtgccgtgctggcatttggatcttaatcttaatccgttcgtcttgcat

SEQ ID NO: 8727 - DNA, 481 bp, Triticum aestivum
  Clone ID: uC-tsrow189050b09b1
tgttgatgcagcttttgatgttctgttagggaagacaacaatgttccccccaaatatcttgttagaccacaatgttcctgtttataaagctgtgcagaagcctggagagtttgttataacattccctcgttcgtaccattcaggtttcagccacggcttcaattgtggagaggctgtcaattttgctattggcgactggtttcctctgggctctctggctagcaaacgctacgcacttctgaacagaacaccctttcttgcacacgaggagctactttgccgttctgcaatgcttctgtcccacaaactgagtgatccagaaacaattaattctgaacatccatacactcaatattgtgtgaagtcttcctttgtgaggttgatgcgactgcagcggcgcacacgcagcttactcgctaaaatgggttctcagatatactacaagccaaaaatgtattcgaacctatcctgtagcatgtgc

SEQ ID NO: 8728 - DNA, 352 bp, Triticum aestivum
  Clone ID: uC-tsrow189050b10b1
gatgcagaagctccgcgacctcaagccttgcgccttgtgcggtctcgatgccacgctgggtgtactgctccgctacgtcaaggcctccttcggtaagcgtgcatgatcagaggactcgatcgagttcgatttcacctactaccggagctacacccaaggcgagccacgtgccaactctgatgtggtcgatgagctcgagcagttggcactgtgcaagtacgacgccgtacctcactggggcaaaaatcgcaactttgcctttgacggcgtcattgccaagtaccccaaagccgctgagttcctcaaggtgaaggccaggtacgaccctgatgggatcttttccagcgagtgg

SEQ ID NO: 8729 - DNA, 378 bp, Triticum aestivum
  Clone ID: uC-tsrow189050b11b1
ggtgctctacctcaaggacgaccagatggaataccttgtggagcgccgcatcaaggatctagttaagaagcactctgagtttatcagctaccccatctccctgtggaccgagaagaccactgctaaggcaatttctgacgatgaagacaatgaggagaagaaggatactgaggagggcaaggttgaggatgttgatgaggagaaggaagagaaggaaaagaagaaaaagaagatcaaggaagtctctcatgagtggaacttggtcaacaagcagaagcctatctggatgaggaagccagaggagatcaacaaggaagagtatgctgctttctacaagagcttgaccaatgactgggaggagcatttggctgtcaagca

SEQ ID NO: 8730 - DNA, 380 bp, Triticum aestivum
  Clone ID: uC-tsrow189050c01b1
tgctcgtcgaccgcctcgcgctttcttcatgtccagggagcggcggttgccgctcgtcctggccctggcggcggcggtggtgggcgtcctcgcggttgcgtcgccgcgggcggaggcggagctgcaggtcgggttctacaatgcgacgtgcccgatcgcggagggggtggtgttcgcggagatgcacgccatcctgcacgaggaccccacgctggcgccctcgctgctccggatgcactaccacgactgcttcgtccagggctgcgacggctccatcatgctcaggtcccgccggggcacggcggagcgggacgccaccccgaaccggagcatgcggggctacgacgccatcgagcggatcaaggccaggctcgagacgc

SEQ ID NO: 8731 - DNA, 203 bp, Triticum aestivum
  unsure (1)..(203): unsure at all n locations
  Clone ID: uC-tsrow189050c02b1
ccttgttgatgaatgccaggcgtatgtagttagatgagaccaatgcatcgttgattgtatcgaaactgaaaactgggcatctgggacgattatttgattatttattgtgtccctgtgggagcctttctcagagttattgaaaatgtatccactactgttatccaagtcttctatctatactgaaacataagagcgtttngatc

SEQ ID NO: 8732 - DNA, 455 bp, Triticum aestivum
  Clone ID: uC-tsrow189050c03b1
acttgttacacacctaatgcagggactatggagctgaggaaagctatctgcaacaagcttcaagaggagaatggtctaacctacagcccagatcaggtgctagtgagcaatggagctaagcagtgcattacacaagctgttcttgctgtttgctcacctggtgatgaggttttgataccagcaccattttgggtcagctatcctgaaatggctaggttggctggtgcaacaccagtgatcctcccgacaagcatatcagacaatttcctgctgaagccagagtcacttgcctcagtgatcactgagaaatcaaggctcttgattctatgctctccatctaatccaacaggctctgtgtatcccaaggagctgcttgaggagattgctgctatagtcaagaagtatcctaggctcctggttctatctgatgagatctatgagcatattatctatca

SEQ ID NO: 8733 - DNA, 432 bp, Triticum aestivum
  Clone ID: uC-tsrow189050c04b1
gtgtcatcccagcaccgcctccggcgcccgggaagcccaaaccaaaccctaagcctccgcgccggcgatggcccgctacgaccgcgcgatcaccgtcttctcccccgacggccacctcttccaggtcgagtacgccctcgaggccgtccgcaagggcaacgccgccgtcggcgtccgcggcaccgacaccgtcgtcctcggcgtcgagaagaagtccacccccaagctccaggactccaggtccgtgcggaagatcgcgagcctggacacgcacgtcgcgctggcttgcgcggggctcaaggcggacgcgcgggtgctcatcaaccgcgcccgcgtcgagtgccagagccaccgcctcaccgtcgaggaccccgtcaccgtcgagtacatcactcgctacatcgccggcctgcagcagaagtacacccagag

SEQ ID NO: 8734 - DNA, 453 bp, Triticum aestivum
  unsure (1)..(453): unsure at all n locations
  Clone ID: uC-tsrow189050c06b1
gtttatctgtcctccggttggacggacggatggatggatggggcgggccctgagcgcttccatgtggttttcgcctgctaaactctgttggatctatacaccttagaccttgtatcgcagttttgccgctcgatccgtgactcatgattcatgagctatacaccttagaccttgcatacatttgcccctatcatcagtataatgattcaaccattgctacccatccattccattccagccaaaggaagagtactagtatgcatttcttgtggtcatataagtattgttgattgatgattcgactgtattcttcctgctagatttggtcagaacaggtgcgggctgataagggttgctcggggttaatgccaaaaacgtagtcatgtgctgagttgcgctacactnttctgtttttatttaccaatacatgtccccaaagatttactccatcac

SEQ ID NO: 8735 - DNA, 460 bp, Triticum aestivum
  Clone ID: uC-tsrow189050c07b1
tgtttacaacagaatggttgcaatgaagcgaaagaacctccttccttcagtggagggaatggacgctgttgactattatgttggcagctcctccaacagtcacttctctgattttgtgcagccaaatcctagtgcacttaccgagcctttgcatccgcgaatgcctttaaacattggtcgaagcaactggattgaccaacacttagttaatcaagaagtatctcagaggaatgtcagagcacgccatgatagtgctaatatttcattggaagctaggccagcttcaacttacacaccaagtagcaatcatcagctgccattccattcaaccacaagtgcttttgcaagtacgtcagcaggaaggaaccaagcacctttttctgtgccaacaagaacattaccttcaggtggcactgggatcactggtaggatctaccatcatcctatgcatagcagcagc

SEQ ID NO: 8736 - DNA, 493 bp, Triticum aestivum
  Clone ID: uC-tsrow189050c08b1
tttcgcgtccggctccgcccggtgtcgacggacaccggcggcggcccgctcgtcgtgcggaaggtgagctacaccgacggccggagcaacgtcatcgtcgagtaccccggcaccgtccccggccgcgtcgtctccttcgtcggcatgcacatggacgtcgttccggccaaccctagcgaatgggacttcgatcccttctcactaaccttcgaaggtgatgacaaggaaaagcttaggggccgtgggacgacggactgccttggtcatgtggcgctagtgactcagctcatgcggcggcttggtgaggtgaaaccaccattgaagcattctgtcattgtggtgtttattgccaatgaagagaattcatcggtcactggcattggtgttgatggtcttgtcaaggatggtttgctggataagctcaagactggacccttgttttggatagatactgcggataagcagccatgcattggtactggtgggatgatcc

SEQ ID NO: 8737 - DNA, 430 bp, Triticum aestivum
  Clone ID: uC-tsrow189050c09b1
tgtttaaaaccgattcagagcttatggtgtgatagaacgagttgtgcttgctcgcaatatgtctagtgctaaaagaaacgattttggatttgtcaacttctcaacccatgaggaggctcttgcttgtattgaagccaccaacaacaccgagctgggtgatgatggaaaagcaaagctaaaagtaagggttagactttcaaaccctttacctaaaagtcaggctgtgaaaggtgaaatgagtggcgggtttcgaattggacatcctggatctggttttaacaggcctggtagaggttttaatagggacagagctgcccctcgccgggaaggtttccatggtgataggggtttcaataatcacactcctggtcgtggtgcgagatttaattctgcatacagtaacaacagttttgaagcttcgccctctgat

SEQ ID NO: 8738 - DNA, 429 bp, Triticum aestivum
  Clone ID: uC-tsrow189050c10b1
gaaaggatagctctgaccgccatagaattggaagcaagagacgaaccgatggagcagcaggacggcctgtcttcttcttcctcctacgcctcctctttctacgccatgaggcagtgcaggatttgccacgaggaggaggacgagagctgcgcggcaatggagtctccctgcgcatgctccggctctctcaagtatgcgcacagggggtgtgtgcagaggtggtgcgacgagaaggggagcaccctctgcgagatttgccttcagggtttcgagccaggctacacagtccctcccaagaaagctccggccgttgaggtgctggttactgtcagcgaggatgaggatgaggaggaggagctggacgggcaccagggcatgcagtatgcgccgtcagacgggccgatggacggcccggacgccgtcggctgc

SEQ ID NO: 8739 - DNA, 434 bp, Triticum aestivum
  Clone ID: uC-tsrow189050c11b1
gggggtgcacgacgccgccagcctgcggagctacaaggccaaggtgctcaaggccatggaatccctggaggaggtggacatgctgcagctgtctttccgggactcgtcggcaaccacggtgtcgccgggctcagtcgcccaggcctcgccggacagcgtcaagtaccccgaggacatgtggtcacggacccattcgccggaagccgagtacaaagaggatgacgagacgggaacaccccgagaagccgaagaggccgaggcgaagatcgtcgaaggggaggggagcagcatcgacatgagcgacgacgatgacgatgaccgctcctcgagcagcaagaagaagatgatcgcggcaccggtgtatgacgccgaattcgccgttgagaacagcttggagcattcggagaaggaaattatcaccataaacgatcatt

SEQ ID NO: 8740 - DNA, 415 bp, Triticum aestivum
  Clone ID: uC-tsrow189050c12b1
tctcctcgcgtccgtggacgcgtgggggagctctctaatcaggcgaccacctatgatgatgttcagccatcgggtgctagttcttttatacctatgtataatcgaactttttgtagatggaatcggttgttctatacgaacaatcctggagatgctttggtctcacgtgctgctgatattgcaaaatttcaactggaaatagatagttcatctggcaactttggtgcaacatcttctctccatagatgtgcatctgatgacttccatttctcgttttggttaggagttcccacgatgggatggttacaaacttaaagtccaagtgactataaaagaaacaacaaaaacatagtaaaatgtataaaattacgcagctttccccccaccactggtggggggttttggagctgacccc

SEQ ID NO: 8741 - DNA, 425 bp, Triticum aestivum
  Clone ID: uC-tsrow189050d01b1
gttgttccatgacaaagtgggtgcctcctctcggtctcaggttctcacttcctcctcctgctgctggcggcagtgattgctcccgtccatgcctatggcaagcttaaggtcgggttctacaggcaatcatgccccgacgccgaggccattgttcgcaggatcgtcaccatggctgtggaagatgacctaacggtcaccgcgccgctgctaaggctccacttccatgattgcttcgtcaggggttgcgatggatcggtgctgctcaactcaaccaagaccaacatcgcggagagggacgccaagccgaacctcaccctggacgccttcaacgtgatcgacgccatcaaggagaagctggagaagaagtgcccgggcaccgtctcctgcgcagacatcctcgccgtcgccgccagagacgcggtctc

SEQ ID NO: 8742 - DNA, 417 bp, Triticum aestivum
  Clone ID: uC-tsrow189050d02b1
cggttctcgtgggtccgcgtccagcgcatctccatggtggtcacagcgtgaagctccgccacctcgcgagttcgtcctcaccctccggccgagcacaccccagctcctccggccgcgcacccgagcccgtcgacaacgcgagctcctcctcacccgccagctgggcgctccgcctcgcgagctccgccggtcacgcaccgctcatccccgaactcgctcgtgtgcctccccgtggcgccgaagcgaatcagctcccgagggcggctgggccggacggcagcgcggctaagcagggcctggcggcggcgcgacgagcaggccgggcggcgccgcggcgggggttgggctggatggcggggcgagcagggtactacagtggagaagaagggccggattgctttttagttttatgtttta

SEQ ID NO: 8743 - DNA, 409 bp, Triticum aestivum
  Clone ID: uC-tsrow189050d03b1
ccctctcgtccgctccattgctcgccaggccgtccttaagccaactcaggtagcagcaactagagccgacatgatggcggaggcgtggatggacgtgctgccgccgccggcgccctacttcgccgggcagccgtgttgggccgtgcagcaggagcgtcgcggaggcggcgcctggacgctggaggagaacaaggtgttcgaggaggcgctcgcggcgatcgacctggacgcgccggaccggtgggagatggtcgcgctgatgttgcccaggaagacggtcgccgacgtggtgaaccactaccgggccctcgagaacgacgtcgggttcatcgaggccgggctggtcccgttccctcactacgacagctcgtccccttcgtccgggttcactctggactgggacgggggc

SEQ ID NO: 8744 - DNA, 457 bp, Triticum aestivum
  Clone ID: uC-tsrow189050d04b1
ccttcttctccttccccaagccgcaacctcccacaaatgtccggctcccctgccctccccggccgcagcagagcgccatgtcgccctcccctacccccgcgccagacgccggcgccgccgcgatggccgtcgacgactcgtcggagaccgaccagctcgactccatgtccacggaggacatcgttcgggccacccgcctcctcgacaacgaggtccgcgtcctcaaggacgagctgcagcggaacaacctggagctcgagaacgtcaaggacaagatcaaggagaatcaggagaaaataaagctcaacaagcagctgccctacctcgtcggcaacatcgtcgagattttggaaatgaaccctgaagatgaggctgaagaggatggtgctaatatagatctggactcacagaggaaaggaaaatgtgttgttcttaagacatccacaagacagactat

SEQ ID NO: 8745 - DNA, 393 bp, Triticum aestivum
  Clone ID: uC-tsrow189050d05b1
cttttgtgtcatcgtgctctggttcccgctcggcattgagccgtgtgacatcaagtacaggaccgagacgtgcgcgacgatccagctcacgcgcgcggccaacatccggtgcggagacaaaccattcaacggcatgtggaacccgcccgagtggtaccactggtcggccggcatcaaggaagtccagtgcttccgcgagcccgtactcgcgcactgggtgtcgtactttctcttttacttggccgagttcatctcgatcatgctgggcttcatgtactatctcggcatgtggaagcccgtgcgtcgtggtgcccagtacctcaaggattttgcaccgcacttcccgccgtccaagtggccaaccgtcgacattttgctctgtcactacgctga

SEQ ID NO: 8746 - DNA, 426 bp, Triticum aestivum
  Clone ID: uC-tsrow189050d06b1
gcgccttcacctccgcgactcgacacgcacagccgcgtgccagcccacctcaatctcacctcgccgccggcagctaacccgcacccccgcgatgcagaagacggcgcagtcctggttcaccggcggctccgcctcccccagcaccgccgcggagtcgcagccctccctgctcgccgactggaactcctacgcagccacccggtcggacgtctcctcctcctcccccctcccgttcgacatcgaggccgccgtccgctcggccaacgacaccgtctccggcaccttcaatgtggtgtccaagggcgtgcgggagctgccggggagcttccagggcgccaccagcagcttcccctcggggaaggcgctcacgtacttcgggctcttcctcgccaccggcatcttcttcgtcttcatcgccttcacgct

SEQ ID NO: 8747 - DNA, 452 bp, Triticum aestivum
  Clone ID: uC-tsrow189050d07b1
tttacaaagcgtttgctaacgaggttcagaacattatggctctccaccatgaaaatgtactgaagttggtcggctactgtcacgaaggtcaaaagaaagtggtgctgaacaacggaagatatattgtggctgacattgttgaaagtttactttgccatgagtacttaccactgggaagccttcagaaacatctttttgaagtacatacaaaaatggactggaacatacgcttcaacataattaaggggatttgcaatggtttgcactttgtacacagcattcctattgtccatatggatctcaagccggaaaacatactgttggatgataacatggtgccgaaaatcgccgatttcggtctctccagactctttggtcaagaacaaacacggatgaacacacagaatgttgttgggtcatatggatacatagctccggaatatctatacaga

SEQ ID NO: 8748 - DNA, 377 bp, Triticum aestivum
  Clone ID: uC-tsrow189050d08b1
gtttggtgggccgaggcggggcggagacggcggagggaaggtggcggaggggaggcgggggcgtcctcgccggtgtttagcaacagagatggcgtgcgccgagtcctccgcgaggagagcttgtaagcaggaggcatgcttcacagtgccggctgcacgcaggtcagatgtcggtttggagaggagctcggcggagctgcgccgtcatgtccgccaccagcaagcttcagtcggtgggtgcgacggcagtcggcggcgccattggggcgcaaggaaggtgatcatgtttttattgagttcttctctgccaagaggaacaacagggacacaagccttatctaactatagtacattttctttatgtatagatgattcac

SEQ ID NO: 8749 - DNA, 434 bp, Triticum aestivum
  Clone ID: uC-tsrow189050d09b1
gttgtccaggaggaagaggaggaaggatcatcctgtaatcctgctgggtgcgagatagccgcagcatggatttcgaactccgtgttatcgaagctatcacaaacaactttgcagatgatcagatagttggcagcggtggatacggagttgtttacagggcgacccatgaaggggaagaaattgccgtgaagaagcttcgtcaactgccaggactcgatgataagcaattcgacagcgagttccgcaaccttcgtaacattcgccaccaaaatgttgtgcggctaattggctactgctacgagtctcggcatagatacatggatcacaacggggaccttgttttcgctcaactaatggagcgagtgctctgcttcgaatatatgcacggcggaagcctcgatgaacatattcaagataaatcttgtgaacttgag

SEQ ID NO: 8750 - DNA, 353 bp, Triticum aestivum
  Clone ID: uC-tsrow189050d11b1
tgcaaggtctgataacattgagagttgcttttcaccaagctacacctaatgaggtgctgtttcacattatacgattgccaaagggtagcacttattctgatttgatcgacgacttaaaatcaaaggttcagctatctcgaagtgatgctgagcttaggctatttcaggtcaacaataacaagatatggaaggtgtacctgcctactgagaaaatagatgcagttcatgatccaaatgtacctcttcatgttgaggagattcctgaagtagagaaaagtgccggtccgcgagaccgtttggttcatgtcgtccacttcttcaaagataaccagcacattcaatacttatggact

SEQ ID NO: 8751 - DNA, 457 bp, Triticum aestivum
  Clone ID: uC-tsrow189050d12b1
tatctcaaacagaaaaacaggagagagaaaaaatcagatggcatcaccctcttccttccttctcctcgctgttcttctcgcgctggtctcatggcaggccactgcctccgatcctagccccctgcaggacttttgtgtcgccgacatgaattcaccagtacgtgtcaatgggtttgtttgcaagaacccaatggaggtcaacgctgacaacttcttcaaggcagccgcgctcgacaagcctagggtgaccaacaaggttggatccaacgtcactttgatcaacgtcatgcagattgctggactcaacaccctcggcatctcaattgtgcgcatcgactatgctcccttgggtcaaaacccaccacatacgcaccctcgcgccactgagatcctcacggtgctcgaggggacactgtacgttggctttgtcacatccaaccagcccgccccaaacaga

SEQ ID NO: 8752 - DNA, 374 bp, Triticum aestivum
  Clone ID: uC-tsrow189050e01b1
cgctttccgccgctactcccctgcctcccccagagctcgttagggttttctcttttttcgggggagaaatctcaagaggcggcaccatgctcgtgtaccaggacaagctttccggcgacgagcttctgtcggattcgttcccttacagggagctggagaacggcgtgctctgggaagtcgatggccattgggtcgttcaaggagcagttgatgtggacattggagccaatccctctgctgagggtggtggtgatgatgaagggtgttgatgaccaggccgtgaaggtggttgacattgttgacaccttccgtcttcaggagcaacctgcttttgacaagaagcagtttatctctcacatgaagcgctacatcaa

SEQ ID NO: 8753 - DNA, 370 bp, Triticum aestivum
  Clone ID: uC-tsrow189050e02b1
cttgttcattcagctaatttttttcaggagaggactcaagtgccttgaggcacttgaaccccatgtaaaagcaatagctgagaaacagcacattgactatcagttcaccggccttgaggacaatgaatgtgacaacgatggctccagctcttaccaagagacttgtagtgatgacagagaactgagtttcgactatgaaataaatgatagagaccaagattttattgcttcgagaggttcaatggatttggataaaggagacctgaggacttccccaacgccaataaaagagatcaagcaggaagaggtgaagctactgaaggcagaagcagcagctccacaagtgaagcctgagatcatcacacattca

SEQ ID NO: 8754 - DNA, 400 bp, Triticum aestivum
  Clone ID: uC-tsrow189050e03b1
ctctttcatgtctgtcccctgttactcaagaggaaaggagagggaacgcgcagcgcagcacatgaggtttccactgactagtacggccgcggttctaactagctgttgcgtggcgtcgccttcttaagccaaggccaagcaagggaccgccggggcgcgagcgcgcggatggcggccaggcactcgtacccgcccacgcgggccacgcggagcgcgccggcgcctcggccgccattgtcccgcctcggggagtcggagacggcggcggcccaccccggcgccgacccggaggcgcgccgcaaggccaagaagcagaaccagctgtggcccaagacggtgctgcgcaagtggctcaacatccggtcgccggactccgacttcagcgccgacgagggcgaca

SEQ ID NO: 8755 - DNA, 447 bp, Triticum aestivum
  Clone ID: uC-tsrow189050e04b1
ccctctcgtccgcccaccctagcctcgctcgccccgaagtcaaacaacagacaacgcatttcctcgaacacctagcctccctccatggccacctccgccctcgccaccctctcggccaccgccgccgccgcgggggccaggcgcgtcctcctctcgcgcggcccctcctccctctccttcgcctcccgccgcctcgcgtccgcgggcccccctccgcgccgggcccctgccccgcgcggcgactcgggccctctccgcgaccgcgtccccggccgccacaacgaccatcgcggtcggcgaccggctccccgacgcgacgctgtcctacttcgacgcccccgacggcgagctgaagacggtgacggtccgcgacctcaccgcgggcaagaaggtggtcctgttcgcggtcccgggcgcgttcacgcccacctgcacccagaagcacct

SEQ ID NO: 8756 - DNA, 70 bp, Triticum aestivum
  Clone ID: uC-tsrow189050e06b1
gagtccgtctctttttaaaaaaaaaaaaaaaaaaaaaaaaaaagaaagataaaaaaaaaaaataaaagga

SEQ ID NO: 8757 - DNA, 271 bp, Triticum aestivum
  Clone ID: uC-tsrow189050e07b1
tttttccttccatccatccccatcgcatcgcaaccgccgcatcggcgagtgagccgcgccagcacggtgctccgagcctgcctgcctgggcgagcctcggcgcgggcggtggccgggttagagagggggaggggacgaggagatcgagggagagagggaggcgacgcgatggcgcgggagcggagggagataaagcggatagagagcgcggcggcgcggcaggtcaccttctccaagcgccgtcggggcctcttcaagaaggccgaggagc

SEQ ID NO: 8758 - DNA, 445 bp, Triticum aestivum
  Clone ID: uC-tsrow189050e08b1
ttttacgcgtccgcccacgcgtccgaaatccccacctgtcgccgcggccggccaccgcgattcaccgccgccgtccgccggagatcggacggctgtccctgccccgacgccgtccctcgcgagccagtgccgccgcctcgtcctcatcgccgtcgccgccttcctcttcttccacccctagcttctccagaggcggccgagtcgccgagtcgccatggaggcctacaaggtctgggtgcggaagaaccgggacctcgtccgctccctcgagtccctcgccaacggggtgacatggatacttcctgagcgcttcgctaactccgagattgccccggaagcagtatatgcacttctgggcattgtaagttctgtcaaccagcatataattgagacaccaactgatggtcactcactggcctccaaggaacaatctatcccatgggct

SEQ ID NO: 8759 - DNA, 446 bp, Triticum aestivum
  Clone ID: uC-tsrow189050e09b1
tttctgggccatgtggtagtctgcttgttgttttctacctccagcgttatcggtacttggaagcatatgatgtccatcgtagtcttcagaactttgagcaaaacacactggaaactgccagtgaagagattgcatccaaaatcagtacaattgctcggtggagagaaggtttggtggctaaatgccttgaaatgcttcctgaggtccagagggatgtgaggtccatcagcagcggggaccaaagtcagtttgccatccgaaccatgcaaatgtcttctccagttaatcctgttgtcaaatcagccagtcctaccattggattgagctcgtccttcacccctgctcttcagaataaatcaaaccctctccactccaggaatatccatgggctgactgattctggtgctcttatcggtagtgtccgttcagagtttggcagaaaggtt

SEQ ID NO: 8760 - DNA, 409 bp, Triticum aestivum
  Clone ID: uC-tsrow189050e10b1
tttctcgcgtccgatcccgcaccgctcgacagacagacagcacgaggaaggcgagccaaccacccaccaccgccgtgagactagcaccacgagcgagctcggccgattccgattccgtctgcgctattaaggtttgtttggaggaaggggaggagtctcggaggtggagctgaggagagagaccggagatggcggcttccgcgaggcagggggagagggcgaccagcttcgccatggcctgcagcctgctcagccgctacgtccgccagaacggcgccgccgccgccgagctcggcctcggaatcaacaagggtgaggccgaggcacagagggcggcggacacgaagagccctttgcccggagcggagggcgaggaggcgggtaggaagaaggagaccatggagctgtt

SEQ ID NO: 8761 - DNA, 503 bp, Triticum aestivum
  Clone ID: uC-tsrow189050e11b1
tcgctcggcgatgcttgtccgcgtcaacaccctgctccaaggatactccggcatccgcttcgagatcctcgagaccatcgccacgctgctcaatgccaatgtgacaccgtgcctgccgctccggggcaccatcaccgcttccggcgatctcgtcccgctctcctacatcgcgggacttgtcaccggccgcccgaatgccgtggccgtggctcctgatggcacaaaagttaatgctgccgaggcatttaagatcgccggtatccaacacggcttcttcgagctacagcccaaggaaggccttgctatggttaatggcacggcggtgggctccgggctcgcgtccattgttctctgtgaagcaaacatccttggtgtccttgctgaagctttgtcggctgtgttctgcgaagtgatgaacggtaagccagagtacaccgaccacctgacacacaagttgaagcaccaccccggacagatcgaggctgcagccatcatggagcaca

SEQ ID NO: 8762 - DNA, 387 bp, Triticum aestivum
  Clone ID: uC-tsrow189050e12b1
tttttgtactctccgttatcctatgcattcgctcagacatgcgtggaggtgatctacagcatcgcgcaggggattgaatacacggtgatcatctatgcgatgattggatatgagtggaaagcggcaaagttcttttatttgctattgttcatagtttcaagcttcaactacttgacattgtttggcatgatgctggtatcattgaccccgtcttccatgctcgcaaacatactgatatcgtttgtactccctctttggaacctgtttgctgggttcctcgtcgtcagaccgttgataccgatctggtggaggtggtactactgggccaaccctgtgtcatggaccatctacggcgtggtggcgtcgcagtttggcgacaacaagagt

SEQ ID NO: 8763 - DNA, 474 bp, Triticum aestivum
  Clone ID: uC-tsrow189050f01b1
agtttttaaacttcagaagatagtgacgggtgcaaagaaggtttatcggaagttcaagcattttaagggtaccacagtcgatcagacatgcagatccgtgacatatcgatgttgtctttgtggggtgtcatcaaattcgttccagttgttgcccactgaagagcaagaaagggaaaaaccttgtgtgaaaaattcaaacttgaacttacctgccgaggaatgtgctgctgcttttgtatttttcaaaacgcggtatgcagcgctaattgtatccaaaattctccagacatccaatcctatgaaatgggtcactagtctggccccagaacctaaagacatgtactggtcaaatctttggttaccgtacaagcagctttggattcgccgcatagctacacttcttggttctattgtttttatgttcattattcttgtacctgtgacatttatacaaggtctaactcagctggaaca

SEQ ID NO: 8764 - DNA, 451 bp, Triticum aestivum
  Clone ID: uC-tsrow189050f02b1
cctcttcgtccgcggacgcgtggggttgagaagccctttggaagggacctggactctgcagaagaattgagttcccaacttggggagctattcgaggaagatcaactctacaggattgaccactacttgggaaaagagttggtccaaaacttgcttgtgcttcgttttgcgaaccgtttgttcttaccactttggaaccgtgacaatgttgataatatacagattgtattcagggaggacttcggaactgatggacgtggaggatattttgatcaatatggaatcatccgtgatatcattcagaaccatttgttgcaggttttctgtttggttgcaatggaaaagcctgtatctcttaagcctgagcacatcagagatgagaaagtcaaggttctgcaatccgtgaacccgataaaggacgaagaggtagtccttggacaatatcagggct

SEQ ID NO: 8765 - DNA, 358 bp, Triticum aestivum
  Clone ID: uC-tsrow189050f03b1
cttttaaaacccagcaaagtacaggagtttcacgatgtctgagtttttcggggccttcttcaaacgagaccttgctagcaaagctctacttgacaacttcaaattgtaagatggttcaagcgtcaccatacaatgtttaaacctgtgtacatgccagtatgtaaccatctcagcgcaaacgtcgtcctgtgagagtgaaatgcaattattctacctcatgtggtttctccatagtgcctcccaacataaagctagtattttttccaccgtgtaatcatcatattcttgttgtctcagtgggctgtcttatggagctgagtgtggcctcaaggctgttagtcttcacacatcgttgaac

SEQ ID NO: 8766 - DNA, 455 bp, Triticum aestivum
  Clone ID: uC-tsrow189050f04b1
ctttgttaccctctgctcgccctcctcttcctcgcagcagcagcagcgtcggcagcccagatcgccatggcggccgagccggagcagcaggcggccgtgcacatcgtgtacgtcgaccgccccgaggacgccgaccccgaggagttccacatccgcaccctcgcccccgtcctcggcagcgaggagaaggccaggggcgccgtcctctaccactacaagcacgccgccagcggattctccgcaaagctcaccaccgagcaggtcgaggacctcaagaagcaaccaggtgtccttcaggttgtgccgagccagacctaccagctccatggacatgagggtggacatgccagcacaacgcgcacaatgggccttatgtgaaagccttgagtaggctctgttcttctaatatgggaatggttgcatctcatggctgtaacctaagaataagagatgta

SEQ ID NO: 8767 - DNA, 453 bp, Triticum aestivum
  Clone ID: uC-tsrow189050f05b1
atttatttcaatctcactcaagagccacctaagcttcttgaagctggaagaaaattggacatgacatattcagtgaagtgggtgcaaacaaatgtggcatttgcacggcgttttgaagtttacttggactacccgttcttcgaacaccagattcattggttctccatcttcaattctttcatgatggtcattttcttaactggtttagtatcaatgatattgatgagaaccctgagaaatgattatgcaaaatatgctcgtgaagatgatgatcttgagtcacttgaaagggatgttagtgaggaatctggatggaagcttgttcatggagatgtatttcgacctccacgcaacctaatgtttctgtctgctgttgttggcattggcactcagatggcagctcttatcctgcttgttattgtacttgccattgttggtatgctttatgttgga

SEQ ID NO: 8768 - DNA, 293 bp, Triticum aestivum
  Clone ID: uC-tsrow189050f06b1
tctcttttcctcccacgcgttctcccacgcgtccggcggcgcctaccggtgcccccggagactgaagagcccagccgtccgcccgcccgcccccgcgatctccggtccctactcccgccgtcccgtcggtgcactcacattgtacactgaaggcagggctttttgtatattaaaattagcattagacccttcatgataagaaaccatggcaccaggatgcatggcatagaaaatagcagcattgtatgccggggcatggatgttcaatgttgtaacttcggttggcataatca

SEQ ID NO: 8769 - DNA, 445 bp, Triticum aestivum
  Clone ID: uC-tsrow189050f07b1
tttacgcgtccgccacgcgtccggcgcgttctgcaaggttctccgggatggcgtcgtcggaggtggtggaggacgaggcgtcggcggcggcgatgctcgccaacggggccgcggacgtccgccggaggagggaccaggccaaggcgatgctgtcgaagcaggccgtcaagatcgccaccaaggcagaggagcacgagcgcttcatcttcaaggtcacacacctgatgggtgttcttggatttgggacattttgctacctcttgggtgctagaccacaggatgtgccgtatgtgtattgcctgttctatgtcatatttgttcctctcaggtggatctactatcgctacaagaagtggcactactatcttctggatttctgctactatgccaacacttttctccttgttatgattctcttttatccaaaggatgaaaagcttttcat

SEQ ID NO: 8770 - DNA, 400 bp, Triticum aestivum
  Clone ID: uC-tsrow189050f09b1
tttacgcgtccgccgtaccattcttacctcaaacaaatccatcgactctgaatcccatcgctccaccatattaatttgcatctctgtggtgttggcgatgccatcaagcgccagggaggaagatcgtaacgcacccgttgtgaggaatgctgctcctccactggttgcctcagaagccaagatgattgtggccataggccatgaccattgccagcagttgaaggatgtgttgagcaaggaggatccttcgaccatggtagtggtgatggcctcaagcaaccagactcctaagccgcccaagcctcgctcgccggtcatggattccagactgctagcagtggcctgctctggttcgtggaagaaactgcaatcatttctcagtggggaagaccgtcaaacc

SEQ ID NO: 8771 - DNA, 445 bp, Triticum aestivum
  Clone ID: uC-tsrow189050f10b1
tgtttcgcgtgggcgccgagccgggaagagccaccaccccatcttcctcgcctccgcttccgaagggtcagagatggcggaccgtgctaaccacccgtctgtcatgcagaagtttggtggacagttccaccttgccttcagcttctatgagggtgttcgtgctcgcaacatctgcccttctgtgccatcctatgagaggcgcttcaccacaagctgctacatgactcagaaccttggcatcagtgtccccatgatgtcatcttctccattgtttgccaatgcaccacctgagaagaaaggtgtcaagaactttgcaattgacttcctcatgggaggagtgtccgctgcagtttccaagactgctgcagctcctattgagcgtgttaagctgcttatccagaaccaggatgagatgatcaaggctggcaggctctctgagccatac

SEQ ID NO: 8772 - DNA, 466 bp, Triticum aestivum
  Clone ID: uC-tsrow189050f11b1
ttcacgcgtccggtccttgtttatgcttgggcagaagacgtcgaactgatgggtccgacaactatcggttccctacagtctgacgagtatgctgttgatcagggagtgatctctggtccagcaacagctatcgccaatgtggcctcaatggtttcaaatgtccctgtggtgggggactttgcacgagctactgaaatgggagcccgagcgataggaggtatagccaaactttttggttattccaatccaccaatgattgacgacgtccaacctatgcagaataaggcatttcatgcatttgcaaatgttgagacgcgtgttcctatagacaaactttgtctggatcccaaaaatgaagtttccatttcgcctgctattgcgggcgttgatgaggaagaccctttggtgatttcagatctctgttgtcgagagagttatatcaacgctttcaattggacaggagcac

SEQ ID NO: 8773 - DNA, 363 bp, Triticum aestivum
  Clone ID: uC-tsrow189050f12b1
ctgtcgcgtgggatctcacattcgcgatcacgtagccaaactgaaacaaccaagagaggaaatcttttcgaaacccaaaccctaggtgctcgcggggagcgccatgaagatcccgtttgtgaccaagtggtcgcaccgatccagcgagcccgcggggccgtcgaattcggctgcagcgcatcagcagcagcaggcgccatcgtctccatcggcgccgtctcctcctcctcccgtggcgtcgacagaggcggcaggggatgagttcattttgcaggaggaagagtaccagatgcagctggcgttggcgctatcagcgtcggcgtcgggcgccgaggaagctggggatcccgacggggagcagat

SEQ ID NO: 8774 - DNA, 426 bp, Triticum aestivum
  Clone ID: uC-tsrow189050g01b1
gttgtttccatctcggtgctaactagctaggcttctgccctcgcatagtcaccccgattcagaaacaataatgttacccaacactcgccatctgattcggctgcttaccatcctcttctttgtgatctgcttctgccgactttcatcctcgcgcgactcacactgcaccggagtccacgacccgcgtaaacccccaatgttattctgcccaccatgctgctcataggaagggtaccggttctagataacggaatgtgcgtatatatggatggcggcttgtcttagaggcatctgtcgctcatagttttctccaagaccattgctcatgaaatcttctactgcctataaatataaatggagtgttcatcattcttcagaagtatttatgtactttccacatgtgtaatcctttcaatcaattacaac

SEQ ID NO: 8775 - DNA, 422 bp, Triticum aestivum
  Clone ID: uC-tsrow189050g02b1
ccttcttcgtccggcaggctgccaagagcatcattgctagcggtcttgcacgccgctgcattgttcagatctcctacgccattggtgtgcctgagcccttatctgtcttcgttgactcttatggtactggcaagatccccgataaggagatcctcaagattgtgaaggagaactttgacttcaggcctgggatgatcagcatcaaccttgacttgaagaagggtggcaacagattcatcaagacggctgcttatggccactttggccgtgaggatgctgacttcacctgggaggttgtgaagcccctcaagtttgacaaggcctctgcttgagacgtgggtatgaaggagtctatcattactgctgctgccgctggtggttgtatcttggataattgaattccttctctatagaaggaagca

SEQ ID NO: 8776 - DNA, 426 bp, Triticum aestivum
  Clone ID: uC-tsrow189050g04b1
agagctttgcggcaaaccatagaagcaaccatgaagaacaccaagctcgtggcgatccttgtcctccaggccatcatggtcatgggaatcctcgcacacgtgaatgccgattacttcccgaagtgctgcaacaactgcaggtccttctcgggggtcgacgtctgcgacgacgcacacccccagtgccccaagggctgctcggcctgccgcgtggtgacgccgagccctcacaagacgttccggtgcgccgacatgaagagcaccgtcgacggcacctgcggcgggccatgcaagaagcactgatccgttcagggcttcaggctcagacgtggtgtgccgtctaaaataaagctcagatgatgagccagcttgtcacagtgtttgtgcgtgcctgtggctccaccttgcataccgacaatatataca

SEQ ID NO: 8777 - DNA, 319 bp, Triticum aestivum
  Clone ID: uC-tsrow189050g06b1
cactatctccctccgcccccaacagcagcggggagctggcctgccgccgccgcgcgccgccggggaggcgatccggcgaccggaggagagcccgccatggcgcggaagcacggctggcagctcccggcccacaccctgcagatcgttgcaattactgtattcttccttctggtggttgcattttatgccttctttgcaccatttctgggaacgcaagtccttgagtatgttgcgataggcatttatactcccatggcattggctgtcttcatcctttacatccggtgcacaagtattaatcctgctgatcctggtatca

SEQ ID NO: 8778 - DNA, 399 bp, Triticum aestivum
  Clone ID: uC-tsrow189050g08b1
tctacgcgtccgccggaggaggctgccggggacaagaaggaggaaattgaggagcagtccgcggccttctggacgacaatcgcgccaaacgtagacgactacagctcgtcggtggcgaggcttatcgccaagggctcggggcagctggtaaggggcatcatctggtgcggggacatcacagcctccggcctgaaatgcggggaggcggtgttgaagaagggtgcgggggcgaacggcaagcatacgcaggtgaagccgagctccctcaagaggatgaagagggccagaagggtcactaaaatgtcgaacaaggtagcaaattcaattctctcaggtgttctcaaagtctcaggatttgttaccagcactgtggtcaactccaaacctgcacagaagttc

SEQ ID NO: 8779 - DNA, 462 bp, Triticum aestivum
  Clone ID: uC-tsrow189050g10b1
cacaggaccttatgttgtttcatttctcttaaggtttatctatggagttatgcatatacttaccaaagctgcttttaaccaaggtacaagtacatatgttcttaatttctacaggcatgcaatagccacaatgttcttactgcccattgcttttgcgattgaaaggtatgccgagttttggcttcttagttacctagttctggatgtcatctaggaagcatgcactgagatttattttgcaggaaaactgccccacaaatgtcatacaaactctgtgtgaagctatttgtgcatgcattatatgggatgtctgctccttttaacatatcatgtgttggcctcaaatatgcttcagcagcttctgcttctgcagtaataaatctcctgccagttttaacttttattttggctcttctgttgggaatggagtctttgcaattaaagcgcttccatgggattatg

SEQ ID NO: 8780 - DNA, 487 bp, Triticum aestivum
  Clone ID: uC-tsrow189050g11b1
ttcacaatcattgccatattagccagaggcgctatacttactataaatgctggtatttatgggtgagttggttaagcaatagttcagctatcccattgagtgtggcacaatcatttcactgtaacacattatacacatagtacaaacatacgtagattatcccaagttattagtaatgtcccaacactgcaaataacagtttttacctgtaactgcatctgtggtatggttttaaatgcgggaccagtccttaaaatgtacatccacagtcccttttgtgcctatattccgcacatcacccttataaattcttctggccacagaatcaatcccaaagttattaataatgactcaacactgcaaataacagttttcgcctgtcattgtgattgtgatctggtttcaaatatgatattagtccttaaatatacatccgcataattttgttattagccctctcgtgcatatatgctgcacatcattcttc

SEQ ID NO: 8781 - DNA, 351 bp, Triticum aestivum
  Clone ID: uC-tsrow189050g12b1
tgtgtgagtgagctcgccacactccccccagcttagccgagctacctcactcaagaaagcatggatccctgcaagttccggccgtcgagctgcttcgacaccaagacgactaccaccaacgccggccagccggtgtggaacgacaacgaggcgctcaccgtcggcccgcgcgggcccatcctgctggaggactaccacctgctggagaagatcgcccacttcgcgcgcgagcgcatgccggagcgcgtcgtccacgccaggggcgccttcggcaagggcttcttcgagtgcacccacgacgtcaccggcctcacctgcgccgacttactccgcgcgcccggtgcgcgcacc

SEQ ID NO: 8782 - DNA, 339 bp, Triticum aestivum
  Clone ID: uC-tsrow189050h01b1
ttctgtcgaggggcacgcggagagagagagaagagagttaatgcggccatttcttcgtcgacctcgtcgcccccgcgcaggcgtgctccgtcgtcgtcgtcgtcgcggccgtcaaaggagaacgattccacacggagttgctgtttttatccgagaagcccggatactcgggattgcgcgggggaggcagcggtccattcctgcggtcgactcggttcttgataggctagtaaaaagagagagagggagggagggatggacgagaaggcagccaagatggagaagctctcgtcggcggcggctttcgtggagggcggcgtgcatgacgcctgcgacgac

SEQ ID NO: 8783 - DNA, 128 bp, Triticum aestivum
  Clone ID: uC-tsrow189050h02b1
gtttgtggttacagcaaccgcgtggtcgacctgatccgccacatggccaagactcagtagagtgctctgctttccttcgaggcccctggtcagaggtgtccctgctttgggtatgcgaagaataaatg

SEQ ID NO: 8784 - DNA, 434 bp, Triticum aestivum
  Clone ID: uC-tsrow189050h03b1
atgggttcagctccaaacaatggaggcagtttcagaaacgcgcgctctgttcatccagggtctctcgggagtgtagggtttcctggtagccctcaaatgtatccatcagatgtccctgtcttcgcacctgccaggggaggttacagggagaccatgttctccccagttggcgctggattcccgtcgctgcaacaaatgtgcaatgcaatgaacagaaggaaccctatggtccaggtttccgcttcctatgatgctacaaatgatcggatgaggaaccgcagacatgatggaaacactgtccagccagaaaacaaaaggctatttgagcttgacattgaacgcatagcttagggtgaagacccacgcaccacactgatgatcaaaaacattccgaacaagtacaactgtaaactgcttctgggtgtcattgatga

SEQ ID NO: 8785 - DNA, 449 bp, Triticum aestivum
  Clone ID: uC-tsrow189050h04b1
gtgttccagaagcacaagccggggtcacatcaactgaaggcgccaggccagcatcttcagggaggtcacttgagagaagatactcttttcttcaaagcgacgagcgccgtttcgtggagagcaggcctgagtgggtcggcgggctatcagatttctgggacagcataaccattgcatacttgtcaattttctgcagctgctgtgttttcgggtggaatgttcagaggcttgggttcggcaacatgtacgtccacattgcaacattcctgctcttttgcctggctccgttcttcatcttcaacctggcagcagtcaacatcaacaacgaaaccctgcgagaggcgctggggctcaccggcatcgcgctgtgcttcttcggtttgctgtacggcggcttctggagaatacagatgaggaagagattcaacctccctgggaaccccttctgc

SEQ ID NO: 8786 - DNA, 402 bp, Triticum aestivum
  Clone ID: uC-tsrow189050h08b1
gtgctccaatggcgttctcctccctcgccaccccttcctcctgctccccctcctcgtctttcaccctccccaccaagccctccccgggcgcaggctccctctccttctgcagggcgtccacggagaagttcaggacggcggctgtgagggcggaggcggtggacacgtccatcagcccgcgtgtgagcgcgctgcggccgtccaagaccatggccatcaccgacatggtcagcgcgctgcggcaggccggggtgcccgtcatcggactcgccgctggggagcccgacttcgacacgccggcggtgatcgccgaggctgggataaatgcaatcagggatgggtctactaggtacacacctaatgcagggactatggaggctgggaaagctatctgcaacaagc

SEQ ID NO: 8787 - DNA, 420 bp, Triticum aestivum
  Clone ID: uC-tsrow189050h09b1
tgtttaaagatgtgacagatgaatgcaatggtttgcgtgtgaaggttgatgaactttctggagaagttgaggcatacaaggagaaatcagcgagtctcgaggctttattagcagaagcaaaccaaaaagaggatgagttgtcagggaagttggctcaagctaatgaagagaaggagaagtatgaagaattgtcaaacaaggccaccacagcgcatttggaagccgagaagcaggtccagactttacaggctgatctagaatctgcccggggtaaaatggaagaggtggagaatgatcttcaggccctgggtgttagagaaagctcagtacttgacaagcttaaatctgcagaggagcatcttgagcacagtgtaagggcactagaacatgccacttacaagaaaattgatctggaatctc

SEQ ID NO: 8788 - DNA, 432 bp, Triticum aestivum
  Clone ID: uC-tsrow189050h10b1
tggttcacctggccgtatttcggaaatttcagcggcgggcaagctacaaactcacaactggcgttttcttgtactggatgaagttgaccagctcttatcatgtaattaccgcgaggatatgcataggatactggagcatgttggaaggaaacctagcacttcatcttctagtcacatccttggaccacttgctaggcggtgtgaacgtcagacaatcttggttccagcaacagtgccgttttcagctatacgcgcaaccaggagtcggggccatgatccagatcttgttagggctaatagtgtacgtccgcttgactagatcactgttccaaggccgatgctgtcccagggtgaccctaactgtgattctgcaacaatgtcagagaatcaagctgcagttgacagcttaccaccatccttggagcattacta

SEQ ID NO: 8789 - DNA, 376 bp, Triticum aestivum
  Clone ID: uC-tsrow189051a01b1
ttgatatcgagcatatagccatggactactaccgcgagacctacggcgggtacgggatggcgacgcccgggtacgcggcgccggtgccgtacggcatgtcgcaggtgaacatcgacggcaactgcggcgggcggccgatgccgccgcagcccacggtgaagatctactgccgcgccaaccccaactacgccatgtccgtgcgcaacggcaaggtggtgctggcgccggacaaccccaaggacgactaccagcactggatcaaggacatgaggtggagcaccagcatcaaggacgaggagggctaccccgacttcgccatggtgaacaaggccaccgggcaggccatcaagcactccctcggccagtcacaccctgt

SEQ ID NO: 8790 - DNA, 373 bp, Triticum aestivum
  Clone ID: uC-tsrow189051a02b1
ttcattcgtccgcggacgcgtgggttccttccatcgaggcaaggcagatccagagtcacggagagatatatagaagtagaaagatctcagctgcaaacggggagtagtgatagtctagattctagaggacatggcggcacttgtcactccggctgcttcagtggtgtccgggctggtggtgcggggccgggagtccgccgccctcctcgaggccttgctccaggggggctcgccgcaggagcacggtgggatccgggagctcgccgcggagatccttctctgctgcgaccgcgcactcgccgcgctccacggccgcgacggcgtgcacgcggacgcgctcgccagcaggaagcgcaagtcgtctgagcccgac

SEQ ID NO: 8791 - DNA, 409 bp, Triticum aestivum
  Clone ID: uC-tsrow189051a03b1
ttctttgaaggaggaggagagcatatgcctacgtttgtctgtctggccaaccaaggagggagggaggatgcagaggtacaccactagggacatatgggagatggaggaccgccagagcccgcgcatggggtgcagcgtcgtcctcggcgttgacggcggcgccagcaacaccgtctgcgtctgcatcccggccgtcatgcccttcgccgacccgctccccgtcctcgcccgcgccgtcgccggatgctccaaccagaactccgtaggagaggacaaggcgagggagacgctggagcgagtgatggcgcatgctctccacaaggctcgccggagacgatcaaacgtgagcgcggtctgcttggccgtagccggcgtcaaccaccccatcgaccagcacagaatgctggac

SEQ ID NO: 8792 - DNA, 364 bp, Triticum aestivum
  Clone ID: uC-tsrow189051a04b1
tccattcgtacgcggacgcgtgggcttaggcaagaaagcaagccagcagtctatacatatttgagtcacatagaagcaagacctggttcttagaggttccgcgacaatgcgacaaatgacgaccatttcggttggcattgttgtgcttgccacacttgttttggcatccgagggtcgcattgcccggaaggacttaggcctaaaccttggtggtgtaggcttggggaccgatacaggtgtcaatatagggggtaacattggcataggtggtgccggctctgcatcggggtctggttctgcgtctggatcagggtcgggatcagcctctggttcggggtctggctcggggtctggttcgggcgct

SEQ ID NO: 8793 - DNA, 311 bp, Triticum aestivum
  Clone ID: uC-tsrow189051a05b1
tcgtgtggcgaagatggtgtcgctgaagctgcagaagcgcctggcctcgagcgtcctcaagtgcggcaagggcaaggtctggctcgaccccaatgaggtcaacgagatctccatggccaactcccggcagaacatccggaagctggtaaaggatggtttcatcatcaggaagcctcagaagatccactccaggtctcgtgcaaggagggcacatgaggccaagcagaagggccgtcactctggatatggtaagcgtaggggtaccagggaggctaggctccccaccaagatcctgtggatgcggaggatgc

SEQ ID NO: 8794 - DNA, 405 bp, Triticum aestivum
  Clone ID: uC-tsrow189051a06b1
tcagttcgggaggagcccacctgcttgaagatggcgtcggagctcaggggactctccttcgccttccagtggactggggcagccgcgcggaagctgaacgcggtgaagtccccggggccgccggcggacgaggtgtccccgcttgagtcgcggcggcggtgcgacgaggagggctcgggggggccggactcgtccccagagtccgccgcgaagctggcacgcgcggccaccgcggcaccggagctcagccggcggcgaagcgcggccacgaagccctcgggggtgaagccgcctccacgcgggcgcggcgggcgccggtggactggcggcggggccttgatctcggcgccgttcgagtcctccattcaaggggctaggtttctctctctgaccctctctctctat

SEQ ID NO: 8795 - DNA, 457 bp, Triticum aestivum
  Clone ID: uC-tsrow189051a08b1
tcgtagagagaggcggccctccctccgcagaccacagtccacaagttcttctctgcttttgtctggctctggtcgcgtctgctcttctggctttcggatcccggagagacttctgctggaaaggagagtgaaatagaaaatgggtgtcgggaatggatcagcagacgtgaaccagcagacggcgcgcaatgaaatacgagatgagaccgcgccgcttcttccggtcaaggtggaggaggagggattccatgagtttaatggagcttcattctccggggcagttttcaatctctcgaccaccatcgttggtgctggaatcatggccttgccagcaagcatcaagatgctgggcctcatccctggccttctgatgatcatctttgtggcactgctcacagaggcatccattgacatgcttatcaggtgcagccaccaaggaaagatcacgtcatatggg

SEQ ID NO: 8796 - DNA, 144 bp, Triticum aestivum
  Clone ID: uC-tsrow189051a09b1
tcttgacggaataatacagttaactttttcccgtacatggtcgtcatgcctttgttttttctgtgttgtattgacaatttggattgatgtacatacatatcagatgatccggtgttaccgcaaagaatgtggctctagttttcc

SEQ ID NO: 8797 - DNA, 225 bp, Triticum aestivum
  Clone ID: uC-tsrow189051a10b1
tttcgaaaaacacaccagagctcacctgtgccctcgctttctggcgaaaatgtcgactgaagtggctgccggtgacataccggtgcctgaggtggaggtagcctccgacgccgacggtgacacaccggcggcgaagccgggcaaggcgcccaaggcggccaaggccaagaagtccactggcccgaagaagccccgcgtcaccccggcccacccgacctacgccga

SEQ ID NO: 8798 - DNA, 382 bp, Triticum aestivum
  Clone ID: uC-tsrow189051a11b1
ttgcgaaaaacacaccagagctcacctctcccctcgcttcctcgcgaaaatgtcgactgaagtggctgccgctgacatcccggtgcctcaggtggaggtagccgccgacgccgccgttgacacaccggcggcgaagccggccaaggcgcccaaggcggccaaggccaagaagtccactggcccgaagaagccccgcgtcaccccggcccacccgtcctacgccgaggtaagcccccgagtccttcgccgtcgttcctcgttccgtctgttctcccgtgtttcccctgatctgactttggttttgtccgttcgtgcgtgctcagatggtgtcggaggcgatcgccgccctgaaggagaggagcgggtcgagcaccatcgcgat

SEQ ID NO: 8799 - DNA, 389 bp, Triticum aestivum
  Clone ID: uC-tsrow189051a12b1
tccacgcgtccggcttaattaccctgacagacattgttaggtcttgtgttagtgaagctagctaggtaagaaaaaccatggcggcttcccgcgccttggctgcactgcttgctgtggtggtattcatggtctgctctccggcgcctcgtgttctcgccactgaccccacccagctccaggacttctgcgttgctgatataatgaaccctgtgattgtgaatgggttcgtgtgcaagaacatgaagatggtaacggcgaacgacttcttcttgcccgggcttaacaagccgggcatgttgaacgctcagggctcggcggtgacaccggtgacggtgcggcagctgccggggctgaacacgctgggcatctcaatggcgcgcatcgacttc

SEQ ID NO: 8800 - DNA, 479 bp, Triticum aestivum
  Clone ID: uC-tsrow189051b01b1
gtctagccagtagagagacggactagactagaccagatctcgtagcggggtctccggccgcctccccctcccggggccagcacgccctgccgtccgccggcggcctgctcggtcgtcggtgagtccgtgcagcggcccgaagaggcgcgtgctcgctccaagggcgaagggggacgcgccggatctcgcggggcaagtgcgccagcgacctgaggtaccttggtatggaatgaagtgaagagcgcagagtatcttggtcttactaatcaatgcatcatattatgtgcgcaataagattttgctatgctttcaccgtcgatgcccactggttggatcatgcttctgtttatgagctcattgaagtaactctctcgtagctcaaatgggccaattcctcatttgcgtggcacacaaaaccttcagctatccatctccatatcagttggtctctcttaattttgtaatcttctggaaatatg

SEQ ID NO: 8801 - DNA, 411 bp, Triticum aestivum
  Clone ID: uC-tsrow189051b02b1
ttcacgcgtccgaatccttggacatgataaagtttgggtcttagatggaggtttccctcagtggcaagcttctggattcaatattggaagcagctgccctgatgatgcagttctgaaatccaaagctgctaatattgctgttgaaacagcttataatggtgaattggcaaatgctgccacatttcagacagagtttcgacatcagctattgtggacactagaaaaggtcaaacacaatgtagctgctaaggctcaccaagtagttgatgcccgagtaaagggcagatttgatggtgtaatgccagaaccaagggaaggagttagaagtgggcatatacctggaactaaatgtgttccgttccctgagatgtctgatggtgcacaaacgctcctccctgcagatgagctatc

SEQ ID NO: 8802 - DNA, 388 bp, Triticum aestivum
  Clone ID: uC-tsrow189051b03b1
caaaccgcaaaaaccattggagcatcctctgtcttcctcctctgcctcctccttcctctacgtcttcctcctccacccccttcctcatctcaaccccacttcaactacagatccacctcgacctcgagcggcttcccatggcgtcgccctccggaaaccctaatcccaaccccaaccccaacgtccccttcgagctcagcaggctcttcaagcctcccccaaaccctaaccaccccacaaccgtgccgacccccactggcatcttcccgggcgccccgcccggcgcgccgatggtcaccgggccgccgggcccctactcctacccgcccgccaccccgcccttccaccgcaaccagtacctcaactaccccaccgatcccaacgccgt

SEQ ID NO: 8803 - DNA, 329 bp, Triticum aestivum
  Clone ID: uC-tsrow189051b04b1
gccttcaagtcccgggtcgacgcggcctgtcccggcaccgtgtcctgcgccgacatcctcgccgtcgacgcgcgcatcggagcttacctgctgggcgggccgtcgtggggggtgccgctgggccgtcgggacgcgcgcacgacgactcaggcagcggcgaacagcaacctgccgtcgccgtcgtcgagcgcggccacgctgatctcggcgttcgcgtccaaggggctggactcccgcgacatggtggcgctgtcgggcgcgcacacgatcggcgcggcgcggtgcgcgagcttccggtcgcgcgtgtacaacgacagcaacatcaacgc

SEQ ID NO: 8804 - DNA, 326 bp, Triticum aestivum
  Clone ID: uC-tsrow189051b05b1
tttggttgttggctgtggcggcaggttcccggtcgaaaaggacgccaaagaggaagtaaagctcttcttgggtaatgctggaactgcaatgcgtccattgacggcagctgtagtagctgctggtggaaatgcaacttatgtgcttgatggagtaccaagaatgagggagcgacctattggtgacttagttgtaggtttgcaacaactcggcgcagatgctgattgtttccttggcactaactgcccacctgttcgtatcaatggcaaaggagggctacctggtggcaaggttaagctctctggttccattagcagtcaatacctga

SEQ ID NO: 8805 - DNA, 424 bp, Triticum aestivum
  Clone ID: uC-tsrow189051b07b1
tcgttccagggttcgtttcccctcggagccgaaaccctagccgccgccgccgacgaccgcgagcaggctcagatgggaggcaagtgcccgcaccgcaaggtcaaaaagcgccgtctcaactgcaagcaggtgcgccgcggcaagttcctcgtcaaagccgacgacgccgtctacgacgagctcgtcaagctggccgaccagggcaaggattccgagggcaaggcgcttcccgtcgacgaggacctccccggcatgggccagttctactgcctccactgcgatcggtacttcgcggatgagaccgtgaaggaggatcactaccgctcaaagcgccacaagaaaagggtcaagcagttgtctggaccagccccacacacgcaaatagatgccgatctcgctggtggaatgggaatgccggacaacg

SEQ ID NO: 8806 - DNA, 427 bp, Triticum aestivum
  Clone ID: uC-tsrow189051b08b1
tcgttcgccggccgcagtcgtgcagcgatttgcttcgcggcgccagtccagtctgcagtctgcatggcgtccacggccgcgggcctctacggccggctcaacaggaccagcacgcgcgcgttcctcgcctacgtcgccgccgggggcgtctgcgccgccgtcctcgcctgcttcgtcgtctcctccgccgaccccgccgccgcacccaatggcgcgccccgcctctcctcgcgctccgcgcgcgtctggcccgatctcgagttcaactggcggctcgtggtggccaccgtcgtcggcttcctcggctccgcgtttggcaccgtcggcggcgtgggcggcggcggcatcttcgtgcccctgctcaacctcgtcctcggcttcgacaccaagtccgccgccgcgctctccaaatgcatgatcatggggg

SEQ ID NO: 8807 - DNA, 414 bp, Triticum aestivum
  Clone ID: uC-tsrow189051b09b1
tcgttcacgcgtccgccacgcgtccgccacgcgtccggggggacagcatgatggataaggatgaagatctgagcagcgatagtgaggacgaagaggatgaggaagaggagaatgctggggctggccagaagaagaagggctggttctcctccatgttcaagagcattgcaggtaacaatgtacttgagaagtctgatctgcaacctgcactcaaagctcttaaagatagactgatgacaaagaatgtggctgaagaaatagcagaaaagctttgtgaatcagtagcagctagccttgagggcaagaagctaggatccttcacaagaatttcttctactgttcagacagctatggaggaggctctccttcgcattttaactccaaggcgatccattgacatattaagggatgtac

SEQ ID NO: 8808 - DNA, 337 bp, Triticum aestivum
  Clone ID: uC-tsrow189051b10b1
tcgtccacgcgtccgggagcattctgtgataacacctcaggggtgactggagccacaagctggacatgtgtatgcactgtaatatcgctaggtgaaccaaactccaacagcagcctgtcatccagttgcgactcctcgtgccattgcctacgagatgaaaacggcggcacagggtcatggaactgttcgtgccgctccgataaggcccttcaggaagaagaagatggtgtggtgcacagcacgagttgcttcacttcctgtaactgcacatctggaaattctgaacaagggaggaagcatttctctagcaaaacagtcattgcaacactcctggtat

SEQ ID NO: 8809 - DNA, 282 bp, Triticum aestivum
  Clone ID: uC-tsrow189051b11b1
tcttcctagcgtccctagtataaaagtcgtaaagaaaaggccggcggtagagagcgagcacaaacaaacacacgagcaggcgccgcgcggcgctcactcacccgcagatctctcgcccggccctctcgatccacctgagtttcccgacggccgcaccgatctgacggtggcggcggcagaggaggcctctagggctagagttttggcgtgatgcagcggtctgggcggggtctgcagcggtcgggttcgaagcgtgtgctcgaccccaccaacggcactggc

SEQ ID NO: 8810 - DNA, 374 bp, Triticum aestivum
  unsure (1)..(374): unsure at all n locations
  Clone ID: uC-tsrow189051b12b1
tcgttccaaagcccccctccccctttctcctctttccctcccaagcaaatcctctgcgctccccacgcctccttcttcttcctctgccgcttgccgtgtttgattcgggaccgaaatggcattccacgacgaggcgccgctgctgctcaggatcaacaccgccagaggcggccacatgggcggaggcgagtgcgacgaggccgagaaccagcggtggccgccgtggctcaagccgctgctggcgaccagcttcttcgggcaatgcaagatgcacgcggacgcccacaagtgcgagtgcaacatgtactgcctcgactgcatcaacggcgccctctgctcccagtgcctcgcctaccaccacggncaccacgcca

SEQ ID NO: 8811 - DNA, 395 bp, Triticum aestivum
  unsure (1)..(395): unsure at all n locations
  Clone ID: uC-tsrow189051c01b1
tcctcgcgtccgcccacgcgtccggtgctaacatccactgcgtcctggctagcaatgattggggttcttgcaggtctgacctttgtgatggggcctcttaaaatgctaaagctctatgcagtcccatatgtgatatttgttatgtggctggattttgtcacatacttgcatcatcatggtcacgaagacaaggttccctggtatcgtggaaaggaatggagctatctgcgcggaggattgacaacacttgatcgggactacgggttgatcaacaacatacaccatgacattggcactcatgtcattcaccatcttttcccgcaaatcccgcattacaatcttgtctaggcgactgaggcagcaaagccagttcttggcangtactacaaagaacc

SEQ ID NO: 8812 - DNA, 322 bp, Triticum aestivum
  Clone ID: uC-tsrow189051c02b1
tgcccccgcagccgccagcgaccaagagcggcggcgaccggtcggcgggcgactcggctcccctgattccctccggtatggacggccaggctccacaccccatcgccgtcgcacccgaatccctgccgcacccacctccgactctggagacggaggcggaggatgaccccgtcgtcgtccccgacacctccgatgccgcttcttcggagccctccaaggtcggcgccctttcgacgtcgcctcttattaaggcggaggacgacccagtcgtcgtccccgactccgtcgaacccgcttcttcggtggcctccgtggttagcgc

SEQ ID NO: 8813 - DNA, 408 bp, Triticum aestivum
  Clone ID: uC-tsrow189051c03b1
ttctcgcgtccgcccacgcgtccggtggggagaccatcagcgacaaggatcgctgtgggcagtgcaaaggcgagaaggtggtgcacgagaagaaagtcctggaggtggtggtcgagaagggaatgcagcatgggcagaagatcaccttccccggcgaggcggatgaagcgcctgatactgttactggagacataatcttcgtcctccagcagaaggagcaccccaaattcaagcggaagggcgatgacctcttctacgagcacaccctgaccctgaccgaggcactgtgtggcttccagtatgtcctggctcatttggacggcaggcagctgctcatcaagtccaaccctggcgaagtcgtcaagcctgattcgttcaaggcgatcaacgacgagggcatgcccatgt

SEQ ID NO: 8814 - DNA, 53 bp, Triticum aestivum
  Clone ID: uC-tsrow189051c04b1
tcctcgcgtccgatttttttttgttttttttgggtgttttttttttttttttt

SEQ ID NO: 8815 - DNA, 295 bp, Triticum aestivum
  Clone ID: uC-tsrow189051c05b1
tggtcgcgtgggcggacgcgtgggcttaacaatgctaggtacaaggactcgataacgaagaacacccgtgggtggaaggaacggtggctctctcggagtgacacgatatcgagtcttggttctgatgtgaggagggaggttaatgccggaatcgctgctgtgtctcgcatgatggagcggctagaaacgagggatgggagtggctctgggccctcatcggcttcttcggacaatgtttcttctgctacaaataatcagggggccgcgtcgtccaacttttgtgcttccgtaaatg

SEQ ID NO: 8816 - DNA, 314 bp, Triticum aestivum
  Clone ID: uC-tsrow189051c06b1
tttttccgccgcgatctcgtctcgatccgcactctctatctgagatttggaatcgggtgaagcctgcagctccagacgacaataagctcgttttgcattcaggcagcggcaacaagaatgccttcaaggcacttattgctgcagagtactgtggggtcaaggttgagctccccaagaacttcgagatgggtgtatcaaacaaaacccctgaattcatcaagatgaacccccttgggaaggttcctgttcttgagactcctgatggtgctgtttttgagagcaatgctattgcacgctatgttgctcgctcaaag

SEQ ID NO: 8817 - DNA, 350 bp, Triticum aestivum
  Clone ID: uC-tsrow189051c07b1
tctctcacgcgtccgtactcctcctcctcccctagggttttgctgcccccctccacacccgtgccgccgccgccgtcgccgcccgcgtccccccatggcgctgccgaaccagaacaccgtcgattaccccagcttcaagctcgtcatcgtcggcgatggcgggactggcaaaaccacttttgtgaagaggcatctcactggagagtttgagaagaaatacgagcccaccattggtgttgaagttcacccattggatttcaccactaactgcggaaagatccgtttctactgctgggacactgctgggcaagagaagtttggtggccttagagatggatactatatccatg

SEQ ID NO: 8818 - DNA, 395 bp, Triticum aestivum
  Clone ID: uC-tsrow189051c08b1
tcgtagaccgccccgtgcgttcagccctttcctctccccattctccacaccggcacaccccacctctgccgccgccgcgcgctcagatgccaatcctccgtcagatttttcgtctcctccggcgacctggcgtcgccatctctcatgacccactgcgccgcctctcctctacctcgcgacctctcctctctttcatggcctctgccccgccttactggtcgccacaaccgcttgcacggcgaagtttccctctcatgatggttccagatctacctgtccgtcgtgtttcccgatttccacctggatctcggagcatgactagtgggacaaccttgcaagatatgaatactatagccggcaaacatgatgcatcttcgaatattgtggacatctct

SEQ ID NO: 8819 - DNA, 417 bp, Triticum aestivum
  Clone ID: uC-tsrow189051c09b1
tcgtagaaactgcagaatttgctaggaagtgggttccgttttgcaagaagcacaacattgaaccaagggccccggagttttactttcagcaaaaaatagattacctaaaggacaaaatccagccttcttttgtgaaggaaagacgagcaatgaagagagagtacgaagaatttaaaatacgaatcaatgcacttgttgccaaagcccaaaaagtgcctgaagaggggtggaccatggccgatggcaccgcttggcctgggaataaccctagggaccatcctggcatgattcaggtgttcttggggcacagtggtggccttgacactgatggtaatgagttgccacggcttgtgtatgtctctcgtgaaaagagaccaggtttccagcatcacaagaaggctggtgcaatgaatgcac

SEQ ID NO: 8820 - DNA, 383 bp, Triticum aestivum
  Clone ID: uC-tsrow189051c10b1
tcgttgacgcgtggtggcgctcctcgacccggagatggatcagctgatccacgacgcggtggctgcccacgaccacatggggatcggccccgtgctccggcagtgcggtgagctcttcgaggggcttgagactctcactgactgcggtggtggtgatgggactacggccaggtccatcgtcgaggcctacccgcacatcaagtgcactgtgctggaccttccaaaggtcatggacaaagttcttcttcccgctcaagaagaaggagcggttaagtatgtttccggtgacctgttccacgtcgtcccacctgctcaagctgtgttgctcaagcttgttctgcacttctggagcgacgaggattgcatcaagatcctcgcacaat

SEQ ID NO: 8821 - DNA, 358 bp, Triticum aestivum
  Clone ID: uC-tsrow189051c11b1
tcgtttcctggtcaccgtgacttcatcaagaacatgattactggtacctcccaggctgactgtgctgtgctcatcattgattataccactggtggttttgaggctggtatctccaaggatggccagacccgtgagcatgccctccttgctttcactcttggagtgaagcagatgatctgctgctgtaacaagatggacgccaccactcccaagtactcaaaggcccgttacgaggaaattgtcaaggaagtctcttcgtacctgaagaaggtcggctacaaccctgacaaggttccctttgttcccatctctgggtttgagggtgacaacatgattgagaggtccaccaaccttgact

SEQ ID NO: 8822 - DNA, 396 bp, Triticum aestivum
  Clone ID: uC-tsrow189051c12b1
tttcatctcctgtgatataccgatggctcagttcattgtcaatatgaatgcgtcaatgcccgcaaaggagtatttcaaatagccattcttgaccccacacacatgttcatccagcctaatatgggagattacatcaaaagtaagatggcggagttcagagaccagaacagctatgagaagccaacgtgaagggccaccatccattaccgcggtgccagcttccatccattaccgcggtgccagcttcaagaaactccatcaagagatacctatgttgattatcgctatgtagaatggttatatgctgagactgaacgtcatgtctctcttgtgatgttctgtttcctacttctgagccaatttatgatacagagttctgcgtcttatgtatcttcg

SEQ ID NO: 8823 - DNA, 315 bp, Triticum aestivum
  Clone ID: uC-tsrow189051d01b1
ttattagcgtgcccacggctgtgaaagtgcaaccagctccattggtgccgccgcagagctcacatcttggtcccagccagagtcagcatgctccgcagagtgctggctcaagcatggccgggcaagaagctgctggggctcccagacctgccgggacgcagtttggtggtgggcagtcgacgtggcaaccgccggactgggcaattgagccgcgccctggggtttactatcttgaggtgatgaaggatgggagtgccattgataggatcaatctggacaagaagaggcatatatttgggaggcaggtgcctgctt

SEQ ID NO: 8824 - DNA, 375 bp, Triticum aestivum
  Clone ID: uC-tsrow189051d02b1
tgtcattcgtccgctaccagtttcagttttctcgttagttactctagcagcaatagcaacagaggatcaagagctgattggtgtggtcggttagccatggctgtcgtgaattttgtcaaggcgcacattgggcagagcccaaagctacaggggcgtactcccaggaggggcagcggcgtggtcaggagctcgctgcagggcgccgtcgtcgggaacagggcggagtggctgaccagctgcgcggtgctctccagcaaggtggccgcgctcgccccccactccaccaacagccacctcgcgctggcggtggcggcttcgaacggcgcggtgctggacttgatccctctggagactgttgatggcagcgcacgccac

SEQ ID NO: 8825 - DNA, 354 bp, Triticum aestivum
  Clone ID: uC-tsrow189051d03b1
tggtttcaagggagctgagattgccatggcctcatactgctctgagctccagttcttaggcaacccggtgaccaaccatgtccagagcgccgagcaacacaatcaagatgtcaactctcttggtctcatctcctccaggaagaccgccgaggccattgacatactcaagctcatgtcctccacattcatggtcgccttgtgccaggccatcgacctccgccatctggaggagaatgttaaggatgccgtcaagagctgtgtgaagatgacggccaggaagacattgagcaccaccaacaatgggcacctccacaatgcgcgattctgcgagaaggacctgctgctcacgattga

SEQ ID NO: 8826 - DNA, 352 bp, Triticum aestivum
  Clone ID: uC-tsrow189051d04b1
taataacagtgggaaaaagaggctgggctcctcgaatctctcaccatctatctcccgtggcttccttgtctgcctgcccacgacttgcctacgccttgccttcggggttggtgagcgagcgagctcgggatcagttggcgactacacacccagagttccaggttcttggaggaggggggaagccatgggcagcttcgccaagctggccaagaggtgcgtggagacggaggcgccggtcatggtgaagatacaagagctgcttcgaggggccacggatgtgatgtcgcttgcgcagggaattgtttattggcaacctcctgaggcagccctgaacaaggtcaaggaaattgta

SEQ ID NO: 8827 - DNA, 277 bp, Triticum aestivum
  Clone ID: uC-tsrow189051d05b1
tggacgcgtgggtttcctctcccctcctctcctttcgcatccctccttccatccatccccatcgcatcgcaaccgccgcatcggcgagtgagccgcgccagcacggtgctccgagcctgcctgcctgggcgagcctcggcgcgggcggtggccgggttagagagggggaggggacgaggagatcgagggagagagggaggcgacgcgatggcgcgggagcggagggagataaagcggatagagagcgcggcggcgcggcaggtcaccttctccaagc

SEQ ID NO: 8828 - DNA, 362 bp, Triticum aestivum
  Clone ID: uC-tsrow189051d06b1
tcctagtccacgccgcgcaggctggaagagctcgaatttcctcactcccgcgtcgcctcgcctcgcctctgctcgctccggagaaggctagctgccccgcgagccgagcgcggcgcccatggcgttcgacaagatccaggtcgccaaccccatcgtcgagatggacggtgacgagatgacacgaattatatggaaatggatcaaagataagcttatatttcctttcctggacttggatataaaatactttgacttaggtctacctaaccgtgatgctactggggataaagtaacgatagaaagtgcagaggctaccctaaagtataacgtggccatcaaatgcgcaactgtcaccccagatg

SEQ ID NO: 8829 - DNA, 379 bp, Triticum aestivum
  Clone ID: uC-tsrow189051d07b1
tctttcacgcgtccggcgaacacaagctactagccggtacttggagaaaccaacaatggcgccgctcgcagcccggaggccagcctgcctcctggccctcctctccgtcgccgcggccttattcctgaccccgacggccttggcggcggggggaaagaccggccaggtgacggtgttctggggacggaacaaggccgagggctccctgcgtgaggcctgcgactccggtatgtacaccatggtcaccatgtccttcctcgacgtcttcggcgccaacggcaagtaccacctcgacctctccggccatgacctctcctccgtcggcgccgacatcaagcactgccagtccaagggcgtccctgtctccctctccatcggc

SEQ ID NO: 8830 - DNA, 416 bp, Triticum aestivum
  Clone ID: uC-tsrow189051d08b1
tcgttgacgcgtggcggacgcgtggggcgccgccaagcttgggtcctacaggagcaactaagccggccgtcgctccggccggactgaagtgtagatatgtgcgaagaagaaggccgcctccagcaaatgcgctatggttgctcgatcccacacctttgtcctgttcagtggctccagtctttgcatcatcagctgctaccgttcctcggcttgtgcatatgtcgatgtgaccgtccattcgtacgtcgacgtgttccggagttcgccatgtttgcttgctgctgtttcttccaagtgtgctatccatttactcgctctatgtatgtatgtatgcatgtggagaatttgtgaatcaaagaattggtatcgtttgtgaaattttattttacttgcaaagaaagagcttccacagcttc

SEQ ID NO: 8831 - DNA, 354 bp, Triticum aestivum
  Clone ID: uC-tsrow189051d09b1
tctttgggttcagagatattcgattatgtgagcctgtgcttgtgttggtcgtgttcaatgatattgtgacggcttctccacttgaatcaaggacctgtatgccttagcattcaaatatgagtagcgatttccagttacaagtttgctcgacaatattgagtaggatgtaagcacatataaggaccagttgcaaagaggcgggcctggacatctgagtatgttgtgatacatagatatacgtacctgcactaggttattgtgattctgtttcaaataagttgtaccttgtgtaaaagacacagcttgtaaggcttgtctcttctttgctaaaatatatataatccctcatagtat

SEQ ID NO: 8832 - DNA, 426 bp, Triticum aestivum
  Clone ID: uC-tsrow189051d10b1
tctttccaagcaacgcataccactgcttcacttactcgatcggccaaagcaagcaagtgaggtgatcatgggcggcgggcacgacatgcacggcggacacaacggcggcgtgaagggcttcgtgtccagcctcgtcggcggcggcaaaagccacgggtacggcggccaggggcacggctgcgaccagggctacggcggccacgggcagcagcagcagcacggctacggcggccacgtgcagcagcacggctacggcggccatgggcagcagcaggggtacggcggccacgggcagcacgggtaccctccgcccgccgccgcggtttgccccccgtacggcggctacccggcgcaaggctacgcgccggcggcttaccccgcgcagcccgcgccacaccacggtgggcacatgggatcgtaccacac

SEQ ID NO: 8833 - DNA, 283 bp, Triticum aestivum
  Clone ID: uC-tsrow189051d11b1
tcgttgacgcgtgggcggacgcgtgggcggacgcgtggtggaagctggctgagagtgacggagtctgtcctctcttcttcttcttccacctcgcacctccttcttgttgttcccgtcacggtgcagcaagcaaacaaaccaacagatcgacacagatccggtggcctcacctcaccggatctccccgttccttctcgtcttgctctcgactcgactggagtggaagcaaagcaaaggaaagcaattatcttgactgattgatggggaagaagcccaagtggct

SEQ ID NO: 8834 - DNA, 391 bp, Triticum aestivum
  Clone ID: uC-tsrow189051d12b1
tctttcacgcgtccgtagctagccatggcatcttccaagagtagtcttgcaatgtttgcactggccatagtcatggccgtggtggctgacgtctcggcgcagaacaccccgcaggacttcgtcaacctgcacaaccgcgcccgcgccgtggacggcgtcggccccgtggcatgggacaacaacgtggccaggtttgcgcaggactgggcggcgcagcgcgccggcgattgccggctgcagcactccggcgggccgttcggcgagaacatcttctggggttccgggcagtcgtggacggccgccgacgcggtgaagctgtgggtggacgagaagcagaactaccatcttgacagcaacacctgcgacgccggcaaggtgtgcgggcactaca

SEQ ID NO: 8835 - DNA, 353 bp, Triticum aestivum
  unsure (1)..(353): unsure at all n locations
  Clone ID: uC-tsrow189051e03b1
tgttcttctggtgcttcatggattcagtttgatgagcccacccttgttaaggaccttgctgctcacgaattggccgcgttctcttcagcatatgctgcactcgagtcggcactctctggattgaatgtgcttattgagacatactttgctgatgttcctgctgaatcttacaagaccctcacatcattgagtggcgtgactgcctatggttttgatcttgttcgtggaaccaagacgcttgagcttatcaagagcgctggtatcccatctgngaagtacttatttgctggtgatgtagatggaaggaacatctgggctgatgatcttgctgcatctctcagcactcttcagtc

SEQ ID NO: 8836 - DNA, 411 bp, Triticum aestivum
  Clone ID: uC-tsrow189051e04b1
ttcattatacatgggcaaataaaatttctgctccccgtggacagatttatggctacagaatgtccctctgggctgagcatattggaattatcgaggaagactttaaccatccagagagcctagagtgcatgaggcgggttcgtcaactcgggcaacataactgggatcagttctttgcaaatgaggtgactgagatgagaggccacctcctcaagtaccctgtaagtgttgaccgtaaaggcaaggtgaaacccttgccaggatgtgcgacattcccagacatgggcggaaacatttgtggctccttcacggccatccaggaaaacctcacaatatgaattctgcttatgcaagcatgcaattgttggtgacttcttgggtattatggacaacagagatgccgaagtagca

SEQ ID NO: 8837 - DNA, 416 bp, Triticum aestivum
  Clone ID: uC-tsrow189051e05b1
ttcacgcgtccggccggcgaggactccgacccgctggtgctcggcctcgtcccctgcgcggtcggcggcaccaggatctggatgtgggctaggggccagccgctgtacgaggccgccgtcgccagggcgcgcgccgccgtggcgggcggcggcggggcgctcggcgccgtgctgtggttccagggcgagagcgacaccgtcgaggtcgacgacgcccgcgcctacggcggcaacatggagcgcctcgtcgccgatctcagggaggatctcggctcgcccaatctgctcgtcatccaggttggtcttgcatcaggggaggggaattacaccgacatcgtaagagatgctcagaaaagtatcaatctttccaacgtgattctcgtcgacgccatgggcctgccgctcagcgacgacca

SEQ ID NO: 8838 - DNA, 416 bp, Triticum aestivum
  Clone ID: uC-tsrow189051e06b1
ttctaagtttagttgagagatcgccggcggccatggcgactgaacagctcaacgtgttgaaagcactcgatgttgccaagacgcaactgtaccatttcaaggcggtcgtgatcgccggcatgggcttcttcacggacgcctacgacctcttctgcatcgccctcgtcaccaagctgctggggcgcatctactacaccgaccctgccctcaacgagcccggccacctcccggcaaacgtgtcggccgccgtgaacggcgtggccctatgcggcacacttgccggccagctcttcttcggctggctcggtgacaagctcggccgcaagagcgtctacggcttcacgctcatcctcatggtcctctgctccatcgcgtccgggctctcgtttggacacgaggccaagggcgtaatgggg

SEQ ID NO: 8839 - DNA, 363 bp, Triticum aestivum
  unsure (1)..(363): unsure at all n locations
  Clone ID: uC-tsrow189051e08b1
tctttatcatgcggatgagaaggataacaaggatgctgcaaaacgatttgggacaaggcacgcccttgttctttatgacttcgcacctagcacacgcacaacagatttggaaaggatctttgagaagtttggagaccatggagttgccatccgctgggtcaatgattctgttgcacttgcagttttccggaccccatcatctgctaaggatgcacaagcttgcgtgcctccaagatacaaagtacggtcactaaaggataatgacgatctcttggcaaaaatcgacggtacagacctagaaccgccgacaccaagaccaaagacatccgcgagaacggcgcanaggctgatcgcccacgggat

SEQ ID NO: 8840 - DNA, 387 bp, Triticum aestivum
  Clone ID: uC-tsrow189051e09b1
tcgtagagatatggagaagtccaaaggacaaactgtggtgctcagcactggtttgaaggacaaaactcctgcctcagagatgatgggggatgctgatgaggaggaagaagaggaggcgttggaggatttcaggatctccgaggatgatgatgatgaagatgaaggagaagatgatgaagtgactcattttggcttttaaggttgattgagttgaacagggcatttactggagggtgttcaggaggacccggtcgggagtggtgtttgtttcgaggttattacagtggaaatgaaatgccatcgatatcactaggtggatcactgccgttagtctgtaaatcaactcgcactataccaaactcgctgcaatctcatgatgaactgaac

SEQ ID NO: 8841 - DNA, 453 bp, Triticum aestivum
  Clone ID: uC-tsrow189051e10b1
cttgccaacccgtgtgactcaaccatgtccagagtgctgagcagcacaaccaggacgtgaactctctgggccttgtctcggccaggaagaccgccgaggccgtggacatcctcaagctcatgtcctccacatacatggtggcgctgtgccaggccatcgacctccgccacctggaggagaacatcaagacctccgtgaagaactgcgtgacgcaggtgtcgaagaaggtgctgaccatgaaccccaccggcgacctctccagcgcgcgcttcagcgagaagagcctcatcaccgccatcgaccgcgaggccgtgttcagctacgccgacgacgcctgcagcgccaactacccactgatgcagaagctgcgcgccgtgctggtcgaccacgccctgaccgccggccccggcgaggccgagagcgaggccacggtgttctccaagatcaacaagt

SEQ ID NO: 8842 - DNA, 361 bp, Triticum aestivum
  Clone ID: uC-tsrow189051e11b1
tcttgcagatttcattacccaacgtagctgcggctagcccacggaggcggggcaaccgggaagtgggaggatgagcgcgcgagcaccaccgccgccgaccatgccggagtgcgactgggcggtcaggcggatccgcaaggagctgaatttgctctggctcgaccccccggcgttctgccggcccggcccggcgcccgtgacggacctgttccactgggaggtggtcatcgatgggcccgacggcagcccctacgccggcggcacgttccccgtcgacgtcgcgatccccaagaagtaccccatgaagcccctcaagatcaccttcaaaactaaggtgtaccatcccaacatcgggccggag

SEQ ID NO: 8843 - DNA, 432 bp, Triticum aestivum
  unsure (1)..(432): unsure at all n locations
  Clone ID: uC-tsrow189051e12b1
tcgttcacgcgtccgcgcaacacactgcaccgcagcgcgcgcacaccatggatctactcctgccactcgtctcgcttcttctgattactggaggaggcagtcatcatgtgagcttcgccaatgcggccacggcgaactcggtgacgccgagggcgtactgggaggcggtgcttcccggaactccaatgcccccagccgtcagcgacctgttactccaacaagaagtgcgtgcctctctagatggtgttgacctcaagtttgtcaaaggactacgaaaaattggaccatattataagaaactcaagtcagaagctgatcaaggggaagaccatagtcatgctgcatcacaagctgaacataatttcaaggaggtctctntgtcgtatggatcaaaaggtggagacaatttaaaggaggtctatgtgtcatatg

SEQ ID NO: 8844 - DNA, 245 bp, Triticum aestivum
  Clone ID: uC-tsrow189051f01b1
ttatattccctcttctcgctcgttagggttaggtctcccccggcgcggcccaatccgcaaatctcgacgacggcgccaagcagcgagcggatccagtcgatctagtcccgcgccgacgagcctatggcgacggcggtgctcagatcccacgacgcgctcgccaacaggatgcatctcgacgccttcgccgcgtccccccaggccgccaagcagcgccgccggcgccaccccaagccggcctcgcc

SEQ ID NO: 8845 - DNA, 332 bp, Triticum aestivum
  Clone ID: uC-tsrow189051f02b1
ttctcgcgtccgccacgcgtccgcgtccgcatggcaccgtacaccaaccaaacactcgcctgccttccttccttccttgttcgttcctcgacgcacgcacgcagatctcatccatccaagccaaggcaggtcaggtcaggtcaggtacgagatggctctcaccagaatgggtctcgctggcctcgcggtcatgggccagaaccttgccctcaacattgccgagaaaggcttacccatctctgtctacaacaggacaacgtacaaggtcgatgagactgttcagcgtgccaagctagaaggaaaccttcctctctatggtttccatgaccctg

SEQ ID NO: 8846 - DNA, 106 bp, Triticum aestivum
  Clone ID: uC-tsrow189051f03b1
tatatgtccggccgtagcgggtgatagccccgtacacgtagaacactcattgtccttgagtaaggcgggacacgtgaaatcctgtctgaacatggggagaccactc

SEQ ID NO: 8847 - DNA, 457 bp, Triticum aestivum
  Clone ID: uC-tsrow189051f05b1
tatggtcatctccacaatgcgcgcttctgtgagaaggacttgttgctcacaatcgaccgtgaggcggtgttcgcttacgcggatgacccctgcagcgccaactacccactgatgcagaagatgcgtgcagttctcgtggagcatgccttggccaatggtgaggctgagcgcgatgcggagacatcagtgtttgctaaacttgccatatttgaacaggagctccgtgcagtgcttccaaaggaggtcgaggctgcccgaagtgccgtggagaacggtactgctacacaacaaaaccgtatcaccgaatgtcgatcataccctctctaccgattcgtgcgcaaggagcttggaactgagtatttgaccggtgagaagactaggtctcccggtgaagaggtggacatggtgttcgttgctatgaaccagggcaagcacattgatgcactacttgagtgtc

SEQ ID NO: 8848 - DNA, 396 bp, Triticum aestivum
  Clone ID: uC-tsrow189051f06b1
ttttctcggcgggagggcgagagggagaggggctgacgttaccccccgcacagatcatcaatcaaaccggagcgagctcgcgtcaattccaccgccagggcgcgcattaatcagattggagtcgcggcctgagccgctccgcccgcgaccacccctcggatcgacccggcggacggaggaggcgcgcgcgcgcgggctgcggagcggggcccgggggcgactaccccactgcatcggcgatgccgagcggggcgtgcgcggcgcccgccgcccccgaccccgaggaggacgcgctgtttatcgatttactacatgaagctcccctgtctggccatcgagagcctaggagcatagtcagtggcaccttgtactgtatattgttggtagggtatgctg

SEQ ID NO: 8849 - DNA, 364 bp, Triticum aestivum
  Clone ID: uC-tsrow189051f07b1
tcgtaaagttgaacgctctcttgccgacggccgcatcacggagattgtgtacaagggcgcgcatgaccacccgaagcccctctccacgcgccgcaactcctcctccggctatgccgcggcggtcgttgcggaggatcataccaacggctcggagcactctggcccgacgcccgcgaattcatctgtcactttcggagacgatgaggccgacaacgggttgcagctcagtcatggcgcggagcccgaggccaagcgccggtaagtaattcatcattgcttgccaaatactacctctatatagattcttagattaatttgaagattgtgtgtttggttggttgtcaggaaggagcatggtgacaac

SEQ ID NO: 8850 - DNA, 380 bp, Triticum aestivum
  Clone ID: uC-tsrow189051f08b1
ctccaggcattcttttttcacaatgaataatgtctgctcttcgactggagcagttcttccctgttggtaatcagaggatacatgctactaattcttcaactgaaattaattttcagtttgatccaagagcaaatcatgaacctcaagttttcttagcacctatgccaaagagaagaagattgttgcttctggttgtgagtgaatctaagagttaacatggtacaatatcttctcgaagatgatgtattccttcataaaaaaggatgttcgagaagttattattgaagaggagttcagtctcatgtgattctcaagagctaaaatggaacaagaagtgcaggcctgtcatgtctacactaactaatcagaaaaaacgtggt

SEQ ID NO: 8851 - DNA, 433 bp, Triticum aestivum
  Clone ID: uC-tsrow189051f09b1
tcttattattgtagtctgatcatcaacattatctatcctttgtagcggcagatattccttagatatcctttgtagacatcccgagcaactgagtgtgcgtgaaattgttataggttattaggcttaacttattgccgcaatttggttgacattgatagcctcatatgatttacaatgcctctgtccgagcaggaggacatttttgagtggcaatttgctatcctggggccccgagacagcgaatttgagggaggaatctaccatggacggatccagttgccctcagactacccgttcaagccaccatccttcatgctgctcacgccaagtggaagattcgagattcagaagaagatatgtttgagcatttccaattaccaccccgagcactggcagccatcgtggagtgtacgcacagcactagtagcattga

SEQ ID NO: 8852 - DNA, 309 bp, Triticum aestivum
  Clone ID: uC-tsrow189051f10b1
tcgtttgcaggcaactccactaccctctcccgttacagtcggcggcgcgatggccgagacggaggacttcgcgagcggtgacggggaggtctggcgtgcggagctgggcgcgtacgaccggcggatcgcggtgctggacaagcccgacctactggacgccgactacttctaccgacacgacctccccctcctgctgcacggtcgtgacccggacccctacctcgccaagcccgagctggtgcagttcatgcagtggaagctctatcgcgggaagcggaggccgaggctgatggatttcgtgaaaagctt

SEQ ID NO: 8853 - DNA, 382 bp, Triticum aestivum
  Clone ID: uC-tsrow189051f11b1
tcgtccacgcgtccgcttccttagcgacgaggccacccagagttccacaggaaagaagcgcgaccggagaaagaagaagaagagcaagatgtcgtcggtgttcagcggcgatgagacggcgcccttcttcggcttcctcggcgccgccgccgccctcgtcttctcatgcatgggggcggcctacgggacggccaagagcggcgtcggggtggcgtccatgggagtcatgcggccggagctcgtcatgaagtccatcgtgcccgtcgtcatggcgggagtgctcggaatctacggcctcatcatcgccgtcatcatcagcaccgggatcaaccccaaggccaagccctacttcctcttcgacggctacgctcacctctcatca

SEQ ID NO: 8854 - DNA, 458 bp, Triticum aestivum
  unsure (1)..(458): unsure at all n locations
  Clone ID: uC-tsrow189051f12b1
tcgttcacgcgtccgggcaatactcgtgaagtgcttcacaaattcagtgtggatctccccaagaagcatggaagaggagggcaatctgctctgcgttttgctcgccttcggatggagaagcgtcacaattatgttcggaaaacagctgaacttgctactcagttcttcatcaacccagctaccagccagcctaatgttgcgggactaatattggctggttctgctgattttaaaacagaactgagccaatctgacatgtttgatcagcgccttcagtgcaaaatacttaatgtggttgatgtttcttatggtggcgagagcggtttcaaccaggccattgagttatcagctgaaattctagcaaatgtgaagttcatacaagagaagatgttgatcgggaagtactttgaagagattagtcaggatactgggaagtatgtctntggagttgatgacac

SEQ ID NO: 8855 - DNA, 348 bp, Triticum aestivum
  Clone ID: uC-tsrow189051g01b1
tccacgcgtccgtcttgtatcaaaggtcccaactctcatcttgggaatggatgtgtcccatggatcccctggacagtctgatataccgtccattgcagcagttgttggttctcgggaatggcctcttgtctcgaaatatagggcttcagtgcgctcgcagtcaccaaagctcgaaatgatagattcattgttcaagccacaaggaactgatgatgatggccttgttcgggagtgtctcattgacttctacaccagttctggaaaaaggaaaccagatcagatcatcatcttcagggatggtgttagtgagagccagtttaatcaggtgctgaacattgaattggatca

SEQ ID NO: 8856 - DNA, 250 bp, Triticum aestivum
  Clone ID: uC-tsrow189051g02b1
tttgttatcatctgtgacgagaagctcaaaaccatctttcctgggagggacacggttcatatgatggaggtcaccaagctcttgtcccctcatttcgtgaagactatctaaggctgtcgagtggggggccaacgcttgtgctttctgcccagggctagcgttggaatggaaggcttcttttgcgatccctgtccaagtcatggttctactaggtagttaagttaatacggagttcagacttcagactttg

SEQ ID NO: 8857 - DNA, 218 bp, Triticum aestivum
  Clone ID: uC-tsrow189051g03b1
tcgttggctgagggtggtggcgtggagggctgctgggccttgcggggcatggtgcttgggggctggcgtgcttggatgcggtggtgggtgcgctcggagtggcggcgagggtttcccagatctgatctggacggtggtggatcctccggccgcttattcgcgggcggcatgggctgcggcggattgggcctgccagcggcgcgcgggggttgctacgc

SEQ ID NO: 8858 - DNA, 335 bp, Triticum aestivum
  Clone ID: uC-tsrow189051g04b1
ttttcaggcaactccactcccctctccccttccagccgccgtcgcgatggccgagacggtggacttcgcgagcggcgacggggaggcctggcgtgcggcgctgggcgcgtacgaccgccggctcgcggcgctggacaagcccgacctcctggacgccgactccttctaccgccacgacctccccctcctgctgcacggccgcgacccggacccctacctcgccaagcccgagctggtgcagctcatgcagtggaagctctcgcgcggcaagtggaggccgaggctgatggatttcgtcaaaagcttggatgacaaagttgtagagtcagcgtcac

SEQ ID NO: 8859 - DNA, 202 bp, Triticum aestivum
  Clone ID: uC-tsrow189051g05b1
ttctttcgtacgtccacgcgtccggcaaactctgtatgtaagcgtctgtatcacatgacaaagaatgatcacctttggagaatggtttgtcagaatgcatggcgcaaccatgctactctggctcttgagaatgtggctggtacaaaacgtttggcatggggacggatagcacgggagccgactacactggaagccgtcacct

SEQ ID NO: 8860 - DNA, 411 bp, Triticum aestivum
  Clone ID: uC-tsrow189051g06b1
ttcgtatcctcaaggagctcaaggacctgcagagggatccccccacctcctgcagcgccggccctgtggcggaagatatgttccactggcaagcgacgatcatgggtccatcggaaagcccatatgctggtggtgtatttttggttactattcacttccccccagactacccattcaagccacccaaggttgcatttaaaacaaaggtttcccacccaaatatcaacagcaatgggagcatctgtcttgatatcttgaaggagcaatggagccctgcattgacagtttcaaaggtgctcctttcaatctgctctctactaacggacccaaaccccgacgacccgttggttccggagattgcacacatgtacaagagcgaccgtgcgaagtatgagtccacagcgaggagct

SEQ ID NO: 8861 - DNA, 412 bp, Triticum aestivum
  Clone ID: uC-tsrow189051g07b1
tcgtctagctaaacagtaaacagagagctctccgtgaatgatgtcgaggaagaggaagaagaagaagtgtggagcacgctgctgctacctggtcgcgctctcagcagtgtgaatttccagaagcatgcttgccgtgccttcttccgggtgcaccggaggccggcatgtgaccaggggtgcttcagtgatgcagaagaaaaaaggcaagtcttatcggcaagggaaggctacgcctttcttccaggtctccctctctccatctaaatccgtgtttggaggagggggctacggctagtttacccaccggtttaccgtgtccttgtgagttgtggtcattatcatgcactcgtcagttgcttgtcatgtatggtgtgcttgaattttcagctacataatggtcggttgtgtcagt

SEQ ID NO: 8862 - DNA, 437 bp, Triticum aestivum
  Clone ID: uC-tsrow189051g08b1
tcttgacattcttccgactttaatgcctttgattcagcaaaatttggctcggacagatgatgagtcctggaaggagcgggaagctgctgttttatcgattggtgctatagcagagggatgcatcactgggttatatccccaccttccacagatggttgccttcctaattccacttctcgatgataagtttcctcttattcggagtattacttgctggaccctctcccgatacagcaagttcattgttcagagccttggccatccaaatggtcgcgaacaatttgataagatcctcatgggtttgctaagaaggatattggatactaacaaaagagtgcatgaagctgcctgttctgcatttgcaacgcttgaagaggaggctgcagaagactagtaccgcgactggaagtcattttgcagcaccttatgtgtgcata

SEQ ID NO: 8863 - DNA, 347 bp, Triticum aestivum
  Clone ID: uC-tsrow189051g10b1
tcgttcttctcctctgatcagtgtggagtactcaaatggatgggacaccatgtcaggtggaggctgcggatcatccggtgaggttggcgatagctttaggttcaaccttgaagaggtcgagtgtgcgactcagtacttctctgaggttaacttgctaggcaagagcggctttgctgcgacgttcaaggggatcctgagggatgggtctgttgtggcggttaagagcctcaataagacaagttgcaagcaagaggagtctgatttcctgagaggtctgaagacgctcaccatgctgcggcatgagaaccttgttggcctgaggggcttctgctgctccagggggaggg

SEQ ID NO: 8864 - DNA, 392 bp, Triticum aestivum
  Clone ID: uC-tsrow189051g11b1
tcgttcacgcgtccgctcccccacccctttcttcttcctccccacgcccgccgccgcccgggacctagggtttcctcgccgccgccgcccccgccgccgaatcgccgcaggaggaggagatgggcacgccggagacctcgcgggagccgtgcccggaccgcatcctggacgacgtgggcggcgcgttcgggatgggggcggtgggcggctccgtcttccatttcctcaagggcacctacaactcgcccaacggcgagcgcctgctcggcggggcccagcaggtgcgcctcaacgcgccgcgcgtcggcgggagcttcgccgtctggggcggcctcttctccgccttcgactgcaccatggtcttcgtgcgccagaaggaggacccctggaac

SEQ ID NO: 8865 - DNA, 479 bp, Triticum aestivum
  Clone ID: uC-tsrow189051g12b1
tcgtgctccaatggcgttctcctccctcgccaccccttcctcctcctccccctcctcgtctttcaccctccccaccaagccctccccgggcgcaggctccctctccttctccagggcgtccacggggaagttcaggatggcggcggtgagggcggaggcggtggacacgtccatcagcccgcgggtgagcgcgctgcggccgtccaagaccatggccatcaccgacatggccagcgcgctgcggcaggccggggtgcccgtcatcggactcgccgctggggagcccgacttcgacacgccggcggtgatcgccgaggctgggataaatgcaatcagggatgggtctactaggtacacacctaatgcagggactatggagctgaggaaagctatctgcaacaagcttcaggaggagaatggtctaacctacagcccagatcaggtgctagtgagcaatggagctaaacagtgcattacac

SEQ ID NO: 8866 - DNA, 309 bp, Triticum aestivum
  Clone ID: uC-tsrow189051h01b1
tttcacgtaagcatctacggagtagcacacattacttgcttagctcaagaaatggccaagggagcggtgatgcttcttgtgctcttcacggtgctgtcagcggtgagccaagcccagctgcagcacgggcccggccacaggaccttgtcccacgggcaccgccggtccgccgaccgagcggcgccgacgcacctccacttcttcttccacgacaccgtgagcggcgcgtccccgtcggcggtgcggtgggggggtccggccgacccgtcgtcgcggaccttcttcgggatggtgaacgtgatggacgac

SEQ ID NO: 8867 - DNA, 315 bp, Triticum aestivum
  Clone ID: uC-tsrow189051h02b1
ttcctcgcgtccgcccacgcgtccgcccacgcgtccggcgttcaggaagcaggcgagcaagttcaaggagcaggtcgccaagcagcagcaggctgtgataaaacaattcagcactactggttacgagcgttcagattctgttgtcattgatgaagttgaattacagcaacatcaaaggcttgagaaattgtacagttctactcgttctggaagggattttcaaaaggacatagttcgagcagctgaaggcttggtgtctattggaagcaagcatattgaagtgggaacaaaattttctgaggattgctatagata

SEQ ID NO: 8868 - DNA, 292 bp, Triticum aestivum
  Clone ID: uC-tsrow189051h03b1
tcctcgcgtccgcgcaacacacctaccacgcgcagcgcgcagagggagatcgagatggcgacggagctgacggcggcgcagctgcgggcgtacgacggcaccgacgcgtccaagccgatctacgtcgtcatccgcggcaaggtcttcgacgtctcggccgggcgcggcttctacgggcccggcggcgactacgcgctcttcgccggccgcgaggccgtccgcgcgctcgccaagatgtccaaggacgccgccgacgtctccggcgacctgttcggcctctccgacaaggagc

SEQ ID NO: 8869 - DNA, 356 bp, Triticum aestivum
  Clone ID: uC-tsrow189051h04b1
tgattatgtgccatgagatgggggtccctttcctcggcaaggtgccgatggacccgcagctgtgcaaggcagccgaggaagggaggtcgtgcttcgccgaccagaggtgcagcgccagtgcgccggctctgaaaagcatcatcgacaagctgatcaaaaccaagtaagcagacagtgtttgtgcctgttggagaagtaccactagtcaaaaatgtaatgatgatatctgggatgtctcgttgtacaattgcttgttacacgcccgagtggttttgactctgttcttagtttcctaaagctttttggcttgtgtatccgggttttgtttcagaaatattgagcgttgatgcgataga

SEQ ID NO: 8870 - DNA, 157 bp, Triticum aestivum
  Clone ID: uC-tsrow189051h06b1
ttcattatcatccccgataccaaagctcatattcttctccttgaaatctttttgggttcacagatttggcggatgtcttgcaactgtggatcccgttgcagctgcggctcacactgcaagtgcgggaagatgtaccctgatctgacagagcagggca

SEQ ID NO: 8871 - DNA, 233 bp, Triticum aestivum
  Clone ID: uC-tsrow189051h08b1
tcgtcgccagcaagctgcttgctttgcttcgggtagctcgctgcgcggcgccgctctcggctcccccgcggccaggctgctaggatggcggggcggccggggtacgtaacgctgccgataatctcggagttcgccgcgatcgggtacagatactacaccgcggtgttcctcgcgatccccgcgtggctggggctcgccacggcggcgggggtcgtcaacgtcgcggcctacac

SEQ ID NO: 8872 - DNA, 118 bp, Triticum aestivum
  Clone ID: uC-tsrow189051h09b1
tcgttgacgcgtggcgcggcggagctcgagaggggcctcgtttaacccaacggggtcgtggtcatcaccctccaccgtgccatggccctcaacgccatgaacctcgaaatggacctta

SEQ ID NO: 8873 - DNA, 405 bp, Triticum aestivum
  Clone ID: uC-tsrow189051h11b1
tcgtttcgccatcaccggcgccaccgcgctcgacacgccctacttcgaggccaggggcctcggcgccgtcatctggaactccggcgccctcatgacccaaatccagtggttccgtgacctcaagcctttcttctgcaactccaccaaggaagaatgcatggagttctatgccaactcgctgttcgtcgtctgcgagttcggtggcaacgactacaacgcgcccctgtttgccgggaagggcctcacagaggcgtacaagttcatgcccgatgtcatccagggcatctccgatggcctcgaggaattgatcgccgagggggcagtggatctcatcgtgccaggggtgatgcccactgtgtgcttccacgtgtacctgaacatgctcgacatgccagcccacgagta

SEQ ID NO: 8874 - DNA, 362 bp, Triticum aestivum
  Clone ID: uC-tsrow189051h12b1
tcttccaaaccctctcgccggagccccagcaaggaagatggacggcagcaaggcgaagaaggtggcggcgaagaagttcggcgggccgaggaagaagtcagtgacgaggtccatcaaggccggcctccagttccccgtcggccgcatcgggcgctacctcaagaagggccgctacgcccagcgcgtcggctccggcgcccccgtctacctctccgccgtactcgagtacctcgcagccgaggtgctggagctggccgggaacgccgccaaggacaacaagaagacccgtgtcgtgccgaggcacctgctgctggccatgcgcaacgaccaggagctcgtgaggctgctgtccggcgtcacca

SEQ ID NO: 8875 - DNA, 151 bp, Triticum aestivum
  Clone ID: uC-tsrow189053a02b1
tcgctttgaaacagcaacagccacagccacacgccgagttgcacacaccagatcgtcgacatgctatggcaaaggcagcggcaacgagggaggagatggtctactcggcgaagctggcggagcacgccgagcggtacgaggagatggtcga

SEQ ID NO: 8876 - DNA, 311 bp, Triticum aestivum
  Clone ID: uC-tsrow189053a03b1
ttccttacgtccgcccacgcgtccgatccagacctggtgtaaattagaggaaatcaaaacattgttcagttctgattctatttctcgagcaaagcagattcttgccatgatacctggaagagcaacaggagcatacagccatagccagggtataaaaggactccgtgatgcaattgcttctgggatcgcttcacgagatggattccctgctaatgctgatgacatttttcttacagatggagcaagtcctggggtgcacctgatgatgcaattactgataaggaatgagaaagatggcattcttgtcccga

SEQ ID NO: 8877 - DNA, 284 bp, Triticum aestivum
  Clone ID: uC-tsrow189053a07b1
tttcctcccacgcgtccgctcatcagctctgctggagttttctttcttctacggctcacctttctgcctttctttctcttttctgttcaagtttagctagcttgccagggctgctacctgctcccgcgcatctcgatctgtttttagtcgatctagatctgcatccgagcaagcaagcaagcttctccattttcttttgcttttgatacacacatacattctagtacatctctccgcctgtttttgttggttggagctttgatttcctttgcattcctagttca

SEQ ID NO: 8878 - DNA, 280 bp, Triticum aestivum
  unsure (1)..(280): unsure at all n locations
  Clone ID: uC-tsrow189053a09b1
gcggccagaactaaaangggcatggttggatttgaagaacatgtcgatgcgtggacgccgtttcttcctgaggagaaggaaacgctatcatctacagggagtaagagggagcatgaacggggaatcaacacggccatggatgatctgctatctagagggagccctcttctacaggttccatcccaaggtctgcatatccagtatcctctccccacgcacacaaggtgtgcgtccatctgcctgaaggcaacgatggaggcagaaaagagccttcaggagg

SEQ ID NO: 8879 - DNA, 468 bp, Triticum aestivum
  Clone ID: uC-tsrow189053a11b1
tacctcccacgcgtccgcccacgcgtccggttggcattgcttgccttccattgagtcttatattctcgtttgtccggcgtccaaaggctgtcatcacacgctcacagtatataaaggaagctactgaattaggtaagaaggccaaggaattgaagaaggcagcggaagcccttcaccaagaagagagaagtgggaacaaaggcagaaaatggcgcaaaaacgtgaaggctgtcgagaaggagttgttacttttggaaaatgacatgaatgctctagaagagatgtaccctcaaggagagaaggcagaggctacctgggcttttacagtgcttgcttacattgggaaactcatattcggcattgttgggttaattgtatcgattgcttgtgttgcacatattatcatatacttgttggttgatcctcctctatcttctttcctgaatgagatcttcataaagctggaca

SEQ ID NO: 8880 - DNA, 332 bp, Triticum aestivum
  Clone ID: uC-tsrow189053b01b1
ttaatatttggtggagaaggagcaagttcagagaaccagtctgctgaggtgactaacaaaattttaaagaaatgtggtggtgtgcctttagcgatcattacaatagctagcttgcttgttggtaaacgatgtgaggattggtctaaggtgtatgatgccattggttttgggcatgaagacaacaaagttgctcataacacaagaaagatattgtcttttagctattatgatctaccttcccatttgaagacctgtttattatatctaagtatgtctcctgaagatagcttgattgggaaaaggacactgatttggaggtgggtctgtgaagg

SEQ ID NO: 8881 - DNA, 194 bp, Triticum aestivum
  Clone ID: uC-tsrow189053b03b1
tttgatggtggacttccccaacattcgtttttggtggaggcatctaactccagaggctgtcttatgttggcggcagcgttctcaaaacatttactatcataggggttgagtttgagtccgagtatgtgccctgaatcgttactgggcaacttttcttaaatacattgtccttgaatccgactgagattattatg

SEQ ID NO: 8882 - DNA, 275 bp, Triticum aestivum
  Clone ID: uC-tsrow189053b04b1
tccctcgcgtccgaccgtgcgccacgccccgtgccgcaaaaacctttcgaaaaccgccgcgccaaccgccacccagccccgtccaagaaaccgtacgccaccgcggacgcgaccccccgccggcgccaagatggtgcggcttagcaacacggtgatcgggaacctgaacgcggtgaccttcctgctctcggtgcccatcctggcgggcggcatctggctgcgggcgcgcgccgacggcaccgagtgcgagcgctacctggcggcgccggtgatcg

SEQ ID NO: 8883 - DNA, 292 bp, Triticum aestivum
  Clone ID: uC-tsrow189053b05b1
cgctccctatcgtccggatatttcccccgagccgaggacaagtcgtctcgtcccgcgctgcgtttctcctcctcccccgctcctcccccattcgccgtccgcggttctctccaccgaacaagctcacacatcaagacaataaatagagcctcgtttgtttggggccgaccaaaccaaacaacaagttcatgtctgatcttaacgcccaggttccaactgctttcgatccgcttgctgaggcaaaagctgcggactccggcgctggtgctggatcaaagaactatgtgcatgt

SEQ ID NO: 8884 - DNA, 100 bp, Triticum aestivum
  Clone ID: uC-tsrow189053b06b1
ttccatgtgaacggcacttgcacatgggtatgctgatcctaagggaccgtgtaaccccggcagatagcgcgatcactcgcatccccccaaagggaatttg

SEQ ID NO: 8885 - DNA, 253 bp, Triticum aestivum
  Clone ID: uC-tsrow189053b07b1
tttcctaccacgcgtacgcccacgcgtccgaaagaaagaagattgcgaaggctcagaaaatgacaaggccaagaaagggaaagataagaagagcgagagcaaagagaaggataaaaatagcgccaaggagactggacctgatgcagatgacagttgccccaagaacaaaaagaaggataaggacaaggcaaagaagaaggatgaaagcgatgaaaaacaagagaaagacaaagactaggtggaacatgagaac

SEQ ID NO: 8886 - DNA, 352 bp, Triticum aestivum
  Clone ID: uC-tsrow189053b08b1
tctccgcctcttcctctggctctccgacaagccggcggcggtgaccactgtctgtgcggtgtcaggaccaggttctcctaccacttccagcccgccaagaactggcagaacgatcccaatggtcccatgtaccacaacggcctgtaccacttcttctaccagtacaaccccgacggcgtgacgtggggcaacggcaacctctcgtggggccactccgtgtccgtggacctggtgaactggttcgcgctcgacgccgcgctccagcccagccgctccttcgacgccaacggctgctggtcgggctccgccaccatcctccctgacggcagccccgtcttgctctacaccggca

SEQ ID NO: 8887 - DNA, 297 bp, Triticum aestivum
  Clone ID: uC-tsrow189053b09b1
gactggcaagggctcaccattatttactcttcctaataaaaatacaaatcatgatctacatctgcaatcgctctaacccttccatctagctacatttctaactagccctatactaaagacaagcagacaactacactaaccacattagcttcgtcccagctaccatcggtgtcaggtactccgacttgatacatccgtatttagacaaatctaagacaagaattttgggacggagggagtaacatctaatctaatttgtcgaaggcgccttctgctcgttactcttccccagcccca

SEQ ID NO: 8888 - DNA, 427 bp, Triticum aestivum
  Clone ID: uC-tsrow189053c03b1
tttgtagctttctgttagtggccataattggggcgcggtcgacatcaatggcaatatgcttagctttaatgttggctcaaaggaagcatttgaagtctctctatcagatgtatcacaaactcagttgcaaggaaaaacagatgttgttcttgagttccatgttgatgatactacaggggctaatgagaaagattcgctgatggatttaagttttcatgtaccaacttcaaatactcagttcctcggtgatgaggaacgtccctcggctcatattttttggcagaaaatcttggctatagctgacgttggctcatcagaagaggctgttgcctcattggagggaattgcaattcttaccccaagaggtcgatacactgttgagcttcatatgtcattcttgcgactccaaggacaagctaatgatttc

SEQ ID NO: 8889 - DNA, 162 bp, Triticum aestivum
  Clone ID: uC-tsrow189053c07b1
tctacggcctgctcatcaaggacaaatacgtcgcgctcccaaacatccttggctataccttcggggtgatccagatggtcctttacgtgtcctacatgaacaagacgccggtggcaagccaggtcaaggaggggaaagaggcatggtaggcgcccgcagagg

SEQ ID NO: 8890 - DNA, 189 bp, Triticum aestivum
  Clone ID: uC-tsrow189053c08b1
tcctcggaccgtgggctcaccccgaacccgcaggtctttttcgatgccgccgcacacaagatggtgaagggacgcaccggccagtgcggaggctctacgtccgcggaccatcctaggatacaagcggtcaagtcgaaccagtcgagacggcgttttggtgcagatcgagggggtgaacaccagggagga

SEQ ID NO: 8891 - DNA, 398 bp, Triticum aestivum
  Clone ID: uC-tsrow189053c09b1
ttcttccacgcgtccgcgcaccttcagcttcattgctttttctacccacccacccacatctaccaatccatagccatctccgtgcaagcatcgaagaagaggtagcaggatggccggcgccggtgccgcagcagcgatcagctcggagcagatgagcgagttccgggaggccttcgccttcttcgacaaggacggcgacggctgcatcacggcggaggagctgtccacggtcatccgctccctgggccagtccccgacgcccgaggagctgcgggacatggtgcgcgacgtggacgccgacggcaacggcaccatcgagttcgccgagttcctggcgctcatgtaccgcaaggccgacgccgacgcggacgccgcggacgccgccgaccccgaggagg

SEQ ID NO: 8892 - DNA, 107 bp, Triticum aestivum
  Clone ID: uC-tsrow189053c10b1
tttcctcccacgcgttcgctcgatcgctcgctcgtgaacgtcttccgagccaccgctccccagtgctgccggccatggacgcctccatcttctccaccacatcctcc

SEQ ID NO: 8893 - DNA, 220 bp, Triticum aestivum
  Clone ID: uC-tsrow189053c11b1
tttattcccacgcgtcgacccacgcgtccgcccacgcgttcggtgcgatctgcactacttacggtaagaaccacaaccaccacaagtgagtgaccatcggagcaaggaaagaccaggagagatggcaatgaggccgcttgtcgtcctggccctggccgtggcgctcgccggcgtggcactgggagggggcgcggcggagggggccggcgagtgcgggagg

SEQ ID NO: 8894 - DNA, 105 bp, Triticum aestivum
  Clone ID: uC-tsrow189053d04b1
ccctactttccacactccctgccccacagagaagagaaccatcgagaaaaatgccgcgccacctgctgcagaagcccgttgaccggctcgccgcactggccgcgc

SEQ ID NO: 8895 - DNA, 225 bp, Triticum aestivum
  Clone ID: uC-tsrow189053d06b1
tttaatccacttccgcccgcggccatggccggggccgacccctaccggagcttcatgaaggacgtgaagcgcatcatcatcaaggtgggcactgcagtcatcaccagaaatgatggaagactggctttgggcaggattggagccctgtgcgagcaggtcaaggatcttaatgctcaaggatatgaggtgattatggtcacctcgggcgctgttggtgtggggcga

SEQ ID NO: 8896 - DNA, 140 bp, Triticum aestivum
  Clone ID: uC-tsrow189053e02b1
tggctcgaccccaatgaggtcaacgagatctccatggccaactcccggcagaacatccggaagctggtaaaggatggcttcatcatcaggaagcctcagaagatccactccaggcctcgtgcaaggagggcacatgaggc

SEQ ID NO: 8897 - DNA, 343 bp, Triticum aestivum
  Clone ID: uC-tsrow189053e10b1
acgaagaacccatctgtaaaattaatatgcgttgaaccagctgaatgttcattgatttcaggtggcgagccaggcttccacaacatcctaggaatagggcctggctttgtcccagaaatattggatagatcccagatagatgagattgtcacagtgactactcaagaagctatggacatggctagaacattggcaagggaagaaggattgcttgttggcatctcttcaggggcaaatgcagctgcctgcttaaaggttgcatcaagagaggagaacaggggaaagatgactgtgacaatgttttccagtggtgcagagaggtatctgaactcggagctctttg

SEQ ID NO: 8898 - DNA, 212 bp, Triticum aestivum
  Clone ID: uC-tsrow189053e11b1
ttcctcccgtgcccgaaccccagccccagctccgggcaggcgccccgcctcgcccacccgcgcctcgcgctctcccaccgcatggcggcggcaccagcggcgatcgccgggccctccggcgactccgagcgcgacctgagcgcgtccgcggtatcggtagaggcatttggggccgtcgaatcctcgggcgatggttcggggaggaaggagcc

SEQ ID NO: 8899 - DNA, 310 bp, Triticum aestivum
  Clone ID: uC-tsrow189053e12b1
taccttagcaatatatttgcaggttttaggtctaagtgaaatgtatcgatctctgtgaatatattgtaaaccttcacaaattcccttgattatttcatagcgctattttaaaataaatgatttgtattggaaaaaccaagttgtccaatatacatattcatgacttgaaaaagtaaaaaaatacagtcattgtatattgtgtttgacttagaaagaaagatgaaaaagctaaacaaaaagatgtgaaggctgatgaatgctttgcttatgcatgaatccatattgataaagcgctattgaatgatcaagg

SEQ ID NO: 8900 - DNA, 299 bp, Triticum aestivum
  Clone ID: uC-tsrow189053f04b1
ttcgtgatgtattctgaaaatggatcaccactgtatttggattaacaattgtgttgggcatgagaattacaaaattttcctcgtctttgtgttgtatgctgcaaccgcaagcttctattctttggctctgatgattggaggcgtagtgcatagtgtgcctacagatgaacaatcaggaattgattctccaagaaaatcgttagttatttgtggcgtctttgtgggtgtaatgactttggcgttgtctatcctcttggtctggcatgtttacctcatcttacataataagactactattg

SEQ ID NO: 8901 - DNA, 138 bp, Triticum aestivum
  Clone ID: uC-tsrow189053f05b1
ccctgcatgacagcacgaggatgcattatcacaatatggaattgctctgcaaattgctgctgaactggaatcttctgaagatatatcctctgcatgccattcaaatcgtgctgtatgtttcttgaagttggggaaatc

SEQ ID NO: 8902 - DNA, 241 bp, Triticum aestivum
  Clone ID: uC-tsrow189053f06b1
tgagtggttaagtatgtttctggtgacctgttccacgttgtctcacctgcccaagccgtgttgctcaagcttgttctgcacttctggagcgaccaggattgcatcaagatcctcgcacaatgcaagaaggccgttcctccccgagaagcatgaggaaaagtcatcgtcatagacattgtgcttggatcggtttctgcagggccaatgctggaaacccaacacctcatggatatgctcatgc

SEQ ID NO: 8903 - DNA, 194 bp, Triticum aestivum
  Clone ID: uC-tsrow189053f08b1
gggctggcctaccgctacgtgggggacgtgcttggggacgcccaggtctacgccgaccacgcggacaagccccagctcgacgccgacgacgtccgcctcgccatccaggccaacgccaacttcttcttcttccagccgccgacccgcaaggttctacttgaataggcacgcagccggaacaagatcccgctgcc

SEQ ID NO: 8904 - DNA, 188 bp, Triticum aestivum
  Clone ID: uC-tsrow189053f09b1
acctacctttgcgtccgcccacgcgtacgtggttctagtgattatgagataacagtcgaggatgctcctcttgcgcgtactgaactcccccaagatggcagagccccacctgtcgtaacaactgatatggaagctttccatgataaagctaagatgcaagtcattaaagaaggccatgggaagatacc

SEQ ID NO: 8905 - DNA, 279 bp, Triticum aestivum
  Clone ID: uC-tsrow189053f10b1
tttcctggctacgtcatccacctctcctccggcatcgccggcttcaccgccgcctactgggtgggaccgaggctgaagagcgaccgggagcggttctccccgaacaacatcctgctcatgatcgccggcggcgggctgctggggatggggtgggccgggttcaacggcggcgcgccctacgccgtcaacatcacggcgtccatggccgtgctcaacaccaacgtcagcgcggcgacgagcctcctcacctggacctgcctcgacgtcatcttcttcggc

SEQ ID NO: 8906 - DNA, 403 bp, Triticum aestivum
  Clone ID: uC-tsrow189053f11b1
tttcctgcgacaggatgccatcttctgtcagtaatgctgatgctagcacatcaggaacagatgctccattctatcaactgaggaaagatgctacaaaacttgttgcatatacatttgaaagggggcggagaaatctttggcaactggcaacaagtcgcctgtctgttttactggcttgttcagctgtttcttcaactagcatataccaatttctgaagaactatgaagatctcacaatatttattttggccggtgaagcattttgtgggtttgaagctagcgaattccgacagaagctgaagacagtctgtttgaactacatagtgacctttcaccggcaaaatatatacgcacttaaaatggtactggaaaaggagtcttggacaataatgtctgctgaagc

SEQ ID NO: 8907 - DNA, 337 bp, Triticum aestivum
  Clone ID: uC-tsrow189053g04b1
ttagttatcccctcaccgcctccgctcccacgccgccgtatccgagacctgatctcggattcaccgcagcgcgaccaaaccctcaggcgatccccggcacctcctccccgacgcttcagccatggcaggaatggcaccggaaggttcccagtttgacgctaagaactatgattctaagatgcaggagctgctgaaccaaggtgagactgaggagttcttcacctcttatgatgaagttcatgagagctttgatgacatgggtctccaagagaacctcctcagaggaatttatgcttatggttttgagaagccttctgccatccagcaaaggggaatc

SEQ ID NO: 8908 - DNA, 212 bp, Triticum aestivum
  Clone ID: uC-tsrow189053g05b1
tgcctcgcccaaatcccccaaaaccctagccccgaggaggaggaggcggaggcggcggctaccatggctgccgcagcggcgaacctggcgggccggccgggtgtgcgcgtcgtcgtcatcggcgaccccggcaccggcaagtccagccttgtcgtcgccgtcgccaccgagcagttcccccgagaacgtccccaaggtcatgccccacaccc

SEQ ID NO: 8909 - DNA, 243 bp, Triticum aestivum
  Clone ID: uC-tsrow189053g06b1
ttgagttcccttctcgcttcctcctcaccccgcactgccccaccgcgccggccccgactccgactccgacactccccggcggcgcgcgctcgccgagctcggtcgcgctgcggttcggatcccccggaggcgtgcggcttcggcgcgggcgagggtcggcggcggtcgcgatggcatccgacgggcgcgtggagcggatcgcgtccagtatccgcgccatccccaacttccccaagccaggga

SEQ ID NO: 8910 - DNA, 73 bp, Triticum aestivum
  Clone ID: uC-tsrow189053g10b1
tcctgagatcccactagcgtcctcctcacccaggactgacccaccgcgccggccccgactccgactccgacac

SEQ ID NO: 8911 - DNA, 181 bp, Triticum aestivum
  Clone ID: uC-tsrow189053h04b1
ttccattcgtccgcccacgcggccgctggccggaaggattctttataggcaagagcggttgatgagagagctcgatggcccgacgatattcacctgggttgcagtaatagccgggatgctggctgcgttctcggccgttttccttccacccgtcggtccggtcaaatgggtgctcgccatc

SEQ ID NO: 8912 - DNA, 250 bp, Triticum aestivum
  Clone ID: uC-tsrow189053h05b1
tcgatgcgtgggcgaacccctctctccccacttacgattcttcggctcccaacgcccaaagccttcgcatccagagctccaaaccctaggcgaggcgaggcgcggcgcaccggagggagaggccatggatcccgattcggtctcgaaggcgttcgtgcagcactactaccagacgttcgactccaaccgcgccgcgctggtggggctgtaccaggacggctccatgctcaccttcgagggcgagaagttc

SEQ ID NO: 8913 - DNA, 180 bp, Triticum aestivum
  Clone ID: uC-tsrow189053h10b1
ttacctgttcggcaatggcggccacgaacatggtctggctgctgtagcgacaagggcggtcatgctcgtccgtgtcaacactctgctccaggggtactccggcatccgctttgagatcctcgagacggttgttgcgctttttaacgccaacgtgacaccatgcctgtcgctccggggcac

SEQ ID NO: 8914 - DNA, 321 bp, Triticum aestivum
  Clone ID: uC-tsrow189053h11b1
tacctctctctgcaagtctctttcattagacacacgcatacagtagtaagtgcacacgaattggagatggcgatggcacccagcaaggttgtggtgctcatggcgttcatggccgctgcgctgagctctgtgtcgatggccgcggggctgcagcacggcttctactactcgtcgtgcccgcaagccgaggacacggagaggaacgtcgtgcaaggcatgatcaacaatgaccccaccatgggcgccgcctttgttcgcctcttcttccacgattgctttgtcaggggttgcgatgcctctattctgctggacccgaccacc

SEQ ID NO: 8915 - DNA, 72 bp, Triticum aestivum
  Clone ID: uC-tsrow189053h12b1
tacctcccacgcgtccgattggtacctctccgacgccttctttttgggatcagttggcctgaagatcagcag

SEQ ID NO: 8916 - DNA, 359 bp, Triticum aestivum
  Clone ID: uC-tsrow189054a01b1
gctcctacggcatcgtctgctccgcgctcaactccgagacgggggagcaggtggccatcaagatgatcgccaacgccttcgacaacaagatcgacgccaagcgcacgctgcgggagatcaagctgctccgccacatggaccacgagaatattgttgcaataagggatattatacctcctgcacaaaggactgcattcaatgatgtctatattgcatatgaattgatggacaccgatctgcatcaaattattcgctcaaatcaagctttatcggaggagcactgccagtattacctttatcagatccttcgtggcttgaagtacatacattcagcaaatgttctccaccgagacttgaag

SEQ ID NO: 8917 - DNA, 376 bp, Triticum aestivum
  Clone ID: uC-tsrow189054a02b1
gttatttcaggcattgcatctgctcgtgccttgtcaaatgctttatttaaggtcacattgctagagtcgcgggagcgacttggtggccgtgtgcatactgactattcttttggctgcccaattgacatgggagcatcttggttgcatggtgtttgcaatgagaattctttggcgccattgattaggcttcttgggcttagattatatcgcaccagtggtgataactctgtgctttatgaccatgatttggagagctacgcgctctttgataaagatggtcgtcaaattccccaggagatagtaaccaaagttggggaaatatttgagcagattctgaaggagacggtgaaaggtagagatgaatatgcaaacgaca

SEQ ID NO: 8918 - DNA, 357 bp, Triticum aestivum
  Clone ID: uC-tsrow189054a03b1
gttttgcctatgtgattggagacccagcgaagcctggccagaagtggcacatctactatgccaccgagcaacctgagcagcccatggtcaccctggagatgtgcatgactgggctcgacaagaagaaggcctctgtgttcttcaagacttctgctgatggccatgtctcctgtgctaaggagatgaccaagctctctggtatctctgacatcatccctgagatggaggtctgtgacttcgacttcgagccctgcggctactccatgaacgccatcaacggatctgccttctccaccatccatgtgacccccgaggacggcttcagttacgcgagctacgaggtcatgggcatggacg

SEQ ID NO: 8919 - DNA, 345 bp, Triticum aestivum
  Clone ID: uC-tsrow189054a07b1
ttgtaggagtccaccctccacctggtgctccgcctcaggggtggtatgcagatctttgtcaagaccctcaccggcaagaccatcaccttggaggttgagtcatccgacaccattgacaacgtgaaggcaaagatccaggacaaggagggcatccctccggaccagcagcgcctcatcttcgctggcaagcagcttgaggatggtcgcaccctcgctgactacaacatccagaaggagtccaccctccacctggtgctccgcctgcgtggtggcatgcagatcttcgtcaagaccctcactggcaagaccatcacccttgaggtcgagttctctgacacgatcgac

SEQ ID NO: 8920 - DNA, 321 bp, Triticum aestivum
  Clone ID: uC-tsrow189054a08b1
tgtccaccgaattcctcgcgattcctctcccctcgcctcctcgtcctccccctcctaggggatcgccggagaggaatcgcgacgagggcttcctcctatcagttaaatcaaagtcatggagcacaaggagaccggctgccagtctcgtgagggccccatcctttgcgtcaataactgcggcttcttcggcagtgcggcgaccatgaacatgtgctccaagtgccacaaggagatggcgatgaagcaggagcaggccaagctggccgcctcctcttttgacagcatcgtcaacggtggtgatgccgcgaaagaacatcttgc

SEQ ID NO: 8921 - DNA, 403 bp, Triticum aestivum
  Clone ID: uC-tsrow189054a09b1
ttgtgttcatgacattactgaggaacccattttacctggccgtcatgtttgtagttttcctagtcgggaaagccatgtgggtacaactagacattgccaatgaattccgaaatggatttcttccagctctcctttcgctgtcgacaaaatttgttccgacaattatgaacattctgaagagactagctgatgagggggcagcgcccgcagccccagagaggcagagagagacggagctccaaccaaggaataatagttcaaacagcaacgtgacatcagcaggttcctccagcttaacctcttcagagaatggacctgaatattcaagcccggtagcacaatgatgagtggatccctagcttttagctgaaagctctagttgtagctgcaacggtttgagcct

SEQ ID NO: 8922 - DNA, 364 bp, Triticum aestivum
  Clone ID: uC-tsrow189054a10b1
tggggtggcacttttgatgtctctctccttaccattgaggagggtatttttgaggtgaaggccacggctggtgacactcaccttggtggggaggactttgacaaccgtatggtgaaccactttgtccaagagttcaagaggaagcacaagaaggatatcagtggaaaccccaggtctttgagaaggctcaggacttcttgtgagagggcgaagaggaccctttcttccactgcccaaaccaccattgagatcgattcactcttcgagggaggtgatttctattccaccatcaccagggccaggtttgaggagctcaacatggacctcttcaggaagtgcatggagccagtggagaagtgcctga

SEQ ID NO: 8923 - DNA, 309 bp, Triticum aestivum
  Clone ID: uC-tsrow189054a12b1
gtctcagttcaaaccagagttctatgagagaactgacagcattatcgcccgctataagcagggacaggtgtgtatgccagtttttgtggagcacctcaaggatgaggtcattggcttgaagaaagtggaggcccagaagacacgagtattttctggtagtccagcggacttcgcagtggtgatgaggaagtatcttctcacgacagtgcgagtgatccaaaacaatcgatatgttttcgaatgtgctcctggaaccaatgcaacctcgttggagtggtgtgagatttatcactacctcatccaacatgg

SEQ ID NO: 8924 - DNA, 257 bp, Triticum aestivum
  Clone ID: uC-tsrow189054b01b1
gcctaagaggagcttgcacaggtaaaacatcttgaaaaatctcaagggtgaacgaagtttcttggcgggcatgcagggcacgagagacatgtctgccaagggcggcaaggccctggtccagtcggacgcggggaagtatgtggcgtggtcgggcgtcgaccagccggagctcgctgcagaggggctcgggtgtggcttgctcctgctcaggccgctctcctttgcgctgacacactacgccgactgccacaagttcg

SEQ ID NO: 8925 - DNA, 369 bp, Triticum aestivum
  Clone ID: uC-tsrow189054b02b1
gttcttggtctctgtttctccagtctccccaccgtcctccctcatcccaaatcgaaccgcctccccgtcgcatcgatcccaatctgaccacccccaaaaccctaaccctcactcgcctcctagcacggcggcgagtcacggcggcggaggcttgagatggctgcgcgggcgtaagcatttcggaggcgatcgcggaggtgggggcttcctgtgacccgccagcggtctagctggtgccggcccgtgcccgtgggtatggcgacgtcgtcgtcggctagcgggggcggtgccgccgggggcgcgcctggactcaagacttacttcaagacccccgagggccggcataagctgcagtacgagaagacccac

SEQ ID NO: 8926 - DNA, 419 bp, Triticum aestivum
  Clone ID: uC-tsrow189054b03b1
ggtctggcggcagcggtgccggcgactccggagagtacagcgcagcggcggctggaggtgcgaagcctcctcaggcggctcaataagcctcctgtcgcaagcattcagagctcggatggtgatgtcatagactgtgtgcacatatccaaacagcctgcattcgatcatcctctcctcaagaaccatactattcagatgcggccttcttacaacccaagaggcatgcatcatgactccaacatcacagcccatgcaatcactcaaatatggcatcaaaatggcacgtgccctaagaacaccataccaatccgaaggaccaaggaggaggatgtcctgagggccaattctattaggaggtttggcaagaagatgcctaggagcatcccacacctcaatccaaccaatgacactgacacacc

SEQ ID NO: 8927 - DNA, 367 bp, Triticum aestivum
  unsure (1)..(367): unsure at all n locations
  Clone ID: uC-tsrow189054b05b1
ttttangtggcatgcacccatgattgacaaccctgcctacaagggaatctggaagccccaagaaatccccaaccctgaatactttgagcttgacaagcctgactttgatccgattgccgctattggaattgagatctggacaatgcaggatggcatcctttttgacaacattcttatcgccgatgatgagaaggtagccaccgccatcttggagaagacatggaagcccaagtttgatgttgagaaggaaaagcagaaggctgaggaggctgcagcagccgattcagaggacctttctgagttccagaagaagatcttcagcgttttgtacaagatcgccgacattccattcttggaaccttacaag

SEQ ID NO: 8928 - DNA, 301 bp, Triticum aestivum
  Clone ID: uC-tsrow189054b06b1
ttatttacaaagaaaatggcctctacggaaaccactagcagcaacaagaagctgcgcgtgctcctcatccccttcttcggctgcagccacataggacccttcaccgagctcgccgttagccttgcgacggccagaccacatgccgtagaggccaccgtcgcggtcacgccggcgaacgcgtcgatcgtacggtcgttgctccagcggcatgagaacggcggcacacctgcgcaggtggcgacttacccgttcccggccgtggacggcctcccgaggggcgtcgagaacctgggtgcggcag

SEQ ID NO: 8929 - DNA, 276 bp, Triticum aestivum
  Clone ID: uC-tsrow189054b07b1
ctcacgcgtccgtgcacacttctctcccacccccaccaggccacaaccatctctccctcccctgtttctcgccttatctccattgccgcctgctgcgcgcttcagcctagccaaggaacgaggaggagcgggttgttgtcatggcggcgtcggcggcggctgtgatggaggagctgcggggcagcttcagggaggggcggacgcggccggccgagtggcggacagcgcagctcagggcgctcgtcaggatgatcgaggagaaggaggacgacatca

SEQ ID NO: 8930 - DNA, 350 bp, Triticum aestivum
  Clone ID: uC-tsrow189054b09b1
gtagcaaacaccattcaagctagctacagggcactagctagacagagctagcaatggcgaaggacattgaggcggccccccaggggggcgagttctccaccaaggactactcggacccgcccccggcgcccatcgtggacttcgaggagctgaccaagtggtcgctctaccgcgcggtgatcgccgagttcgtcgccacgctcctcttcctctacatcaccgtggccaccgtcatcgggtataagcaccagtccgaccccaccgtcaacaccaccgacgcggcctgcagcggcgtcggcatcctcgggatcgcctgggccttcggcggcatgatcttcgtcctcgtctac

SEQ ID NO: 8931 - DNA, 314 bp, Triticum aestivum
  Clone ID: uC-tsrow189054b10b1
gaaaaattggatagctacgtgcattcgccagaccaaatattttacagtaccttgcatcacagaataacaacaaatatttgaaatttgaccatagaggaacactacaatacagtcaagtaaaatatctgaacattcttagtttaccgtccaaaatacttgaaccacaggccggcattcatatctgacttgttctatttctcgcagatcatgtctttatgcgcaccacaaaagaacatgctggaaggtttgacatatctgcagagacagcacacggaattcccaagtttgtgagagcacctcttattaacccacat

SEQ ID NO: 8932 - DNA, 346 bp, Triticum aestivum
  Clone ID: uC-tsrow189054b11b1
tgtgcgagcgtctccggaggccccaaccctagatcgagcagagcggccgacctcctccctcccacgcccggctgctaaaggcagcgggcgaggtcagcgcgccccgacgagcctccctcgcgcgggggagcggcgtcaagggggcgtcgcggtggggatctccggtgaggcggcgcgcggcgaggtgcgtatggcaaggcggagcacggccgagggctcgaagtggaggtgctgggcacggtgttcttcgcggcgtcgggcggaggttggaggggctgcgcacccaggccctagaggcagcagatctcggccaggagaggccgcactggcgatggccgggatttgc

SEQ ID NO: 8933 - DNA, 209 bp, Triticum aestivum
  Clone ID: uC-tsrow189054b12b1
tgtcagtcctcctcggtcctcgcccccatccaaatcccccgccgcccccctcgcggaggaggaggccggcggccatggaagaggagaggaaggggttccagccccacctgatgggcctgggcggcgggaggctgaggggcgcggcgggggcgatgggcctgcagaagcagaactcgtggtcgcccgacatcgagcgggacgaggcgtgg

SEQ ID NO: 8934 - DNA, 181 bp, Triticum aestivum
  Clone ID: uC-tsrow189054c01b1
attgtactaggtctcggtcattcctctctctctctcccttgcttggggaagaagaagatgatgatgagagggcaagcgcccccgtctcccgacgccgtcgtcccttgccgccgatctgatctcaggagccagcgaagatgcattccaccactctgctcctcgaggagcccatccggatggt

SEQ ID NO: 8935 - DNA, 247 bp, Triticum aestivum
  Clone ID: uC-tsrow189054c02b1
gtcttcagcgagcggctgcagcggctggcgacgccgtcggccccggcggaggacgacgtggacgtggacgccgacggcgacagtaccacttaccgggacatccacccgtcgccggcgccggcgccgttgcggcagccgtcctgggacgtggccagccagcgctcgctgtccttctactgcgacgagcagttcatgtccagcagcatgggccgcgagttcatggccatggtggatgcggggggcgcgc

SEQ ID NO: 8936 - DNA, 265 bp, Triticum aestivum
  unsure (1)..(265): unsure at all n locations
  Clone ID: uC-tsrow189054c03b1
gtgncttgttcacaatctctggtgccgaggagatcctcaaggcactgtaggagcttcagcgcttcggaatcgcagcgatcacccaaaccttgtgtcatatcgatgtagtttgaacttgtctgccgaactactagtgggaataaattgtcaatgtgcatttcttcatgtactttatgtgcggtgcaagtgacttcagagttttccggtcaacttgttggttgtgttgcaaacattctgagattgttcaaggaaaatggtgtgggtg

SEQ ID NO: 8937 - DNA, 276 bp, Triticum aestivum
  Clone ID: uC-tsrow189054c04b1
gatctttgaggtgaaggccacggctggtgacactcaccttggtggggaggactttgacaaccgtctggtgaaccactttgtgcaagagttcaagaggaagcacaagatggatatgacaggaaacccgaggtctgtgagaaggcttaagacttcttgtgagagggcgaagaggatcctttcttgcactgcccaaaccaccattgagatcgattcactcttcgagggagttgatttctattacaccatcaccagggccaggtttgaggagcttaacat

SEQ ID NO: 8938 - DNA, 410 bp, Triticum aestivum
  Clone ID: uC-tsrow189054c05b1
ctttcgcgtccggtgaggaaagctctgtatgcctccaagatctgcagctatgcccagggcatgaacatcatcaaggccaagagcgtggagaagggatggggcctgaacctgggcgagctggccaggatctggaagggcgggtgcatcatccgcgccagcttcctggaccgcatcaagaaggcgtacgacaggaacggcgagctcgcgaacctcctcatcgaccccgagtttgcgcaggagatcatggacaggcaggccgcatggaggagggtcgtgtgcctcgccatcaacaacggcgtgagcacccccggcatgtcggcgagcctggcctactttgactcgtacaggagggagaggcttcccgcgaacctcgtgcaggcccagagggattactttggggcgcacaccta

SEQ ID NO: 8939 - DNA, 345 bp, Triticum aestivum
  Clone ID: uC-tsrow189054c06b1
gtcctccgctgccaatggggatggcgagggccctgctgccgcagcgcgcgccgctgctccggcggctcctcatggccggcgcgctggccgcctcctgcacctgcttcctcctcgtcctccaggcgcaggcctccgtcccgccgcgctacgacgggttcgcctacggggtcggggccgccgcctggaaggacgccgtcctcgtcgaggccttcctcgacccgctctgccccgacagccgcgatgcctggcacccgctccggctcgccgtcgagcgctactccccgatggtctccctcatcgaccatcccttccctctcccgtaccacacctattcataccatgcct

SEQ ID NO: 8940 - DNA, 421 bp, Triticum aestivum
  Clone ID: uC-tsrow189054c07b1
ttgtctccgtgtgggcggagcgaagtgggagccaacgccaagccagccgagcggactcctctcctcctcgcagcagttcgcgattcgcccccaaatccagcgccctccccgccggaatccggcgccgaatcttgcagagagcttgaaccgagctatggacaacttgtggcatctcggagatgagttccgtgggcaatcaaaggtggtggaggaccgccaatggtctctcatgacatcaaagctggctgagatcacaaagtcaaaggctgagaggatgaatgactttgagtatgcacggatgaacaccgtccctgatgtgaagcaatgggataagttatcctaccaccaagaagacaacaagatggaccacctcaatcttggcctcatgaacctggatcttaagatgaatgatctcaagatg

SEQ ID NO: 8941 - DNA, 64 bp, Triticum aestivum
  Clone ID: uC-tsrow189054c09b1
aaaaaaaaaaaaaaatttttaaaaaaaaaaaaaaaaaaaaaaaaaaaaaaaaaaataaaaaaaa

SEQ ID NO: 8942 - DNA, 374 bp, Triticum aestivum
  Clone ID: uC-tsrow189054c10b1
gtcgcgcctccccccgcaccacctcgatgacttccgagacccggctcgcctgccacctggccaccccgacagcctccgcgagcatcctcctccgccgcgccaccacttcgcaggccacggcggaggggccctgccccccgcatcgcacatggccgcggcgctggaggaacgtatcggcgcggagatcgaggaggcgcacgcgctgctcggacagaaccagcgactctctgcgacgcacgtggcgctcgtgcaggaggtctccgccgtgcggcacgagcttggccacaccgctcgagccatcggcgctgcccagcaagagggagatctccgtattcgtgaggtctatgagaggttaatgaaaatggaagcagagc

SEQ ID NO: 8943 - DNA, 316 bp, Triticum aestivum
  Clone ID: uC-tsrow189054c11b1
tggacgcgtgggcgaccggatcgtcgccaggggccactacacggagcgcgccgccgctgtggtcaccaagaccatcgtcgaggtcgtgcagatgtgccataagcatggagtgatgcaccgggacctcaaaccagagaatttcttgtttgcaaacaagaaagaaaccgcggcgctgaaagcaattgattttggcctgtctgtttttttcactccaggtgaacggttcactgagattgttggaagtccttattacatggctccagaggtgttaaagagaaactatggccaagaggttgatgtttggagtgcaggagtg

SEQ ID NO: 8944 - DNA, 333 bp, Triticum aestivum
  Clone ID: uC-tsrow189054c12b1
tccgccccgtttattcccctccggcgcagccgcccccgtgtcctgtgcgcaccttctcgaagcctcctccctccctcatggcggaccagctgaccgacgagcagatcgccgagttcaaggaggccttcagcctcttcgacaaggatggcgacggttgcatcaccaccaaggagctcggaaccgtgatgcggtccctcgggcagaaccccacggaggcggagctgcaggacatgatcaacgaggtcgacgcggacggcaacggcaccatcgacttcccggagttactgaacctgatggcgaggaagatgaaggacactgactcggaggaggagc

SEQ ID NO: 8945 - DNA, 117 bp, Triticum aestivum
  Clone ID: uC-tsrow189054d02b1
cgtgctgcaagccagttcatcctgcgagcactacttttacctgctgtacgaagcaggctagcaagcaactaggagctaaccagccaggcaggcgaggagagcatggcatgctaccac

SEQ ID NO: 8946 - DNA, 103 bp, Triticum aestivum
  Clone ID: uC-tsrow189054d03b1
ccttggtcctccggtgagaggtggcgccgaagccggtggtgacaccgtagctgtcggtgccgttcatcatgctgttcatgacccagtcgctgctctccttgac

SEQ ID NO: 8947 - DNA, 52 bp, Triticum aestivum
  Clone ID: uC-tsrow189054d04b1
tgggattatggatttctgggtggctatacatccagatgcagaaaccaagcca

SEQ ID NO: 8948 - DNA, 82 bp, Triticum aestivum
  Clone ID: uC-tsrow189054d05b1
gcgttgtatacgactgcaacaacgttgtggagcaggagctcccctgtggaggcgtcctcatctaccagagctttaccgtgaa

SEQ ID NO: 8949 - DNA, 400 bp, Triticum aestivum
  Clone ID: uC-tsrow189054d06b1
tttttgcgtccgcccacgcgtccgggaggatgccatttcctttctcctccttgctgcacttcttgcgttagtctcatggcaggccactgcttctgatcctagcccactccaagacttttgtgtcgccgacatgaattcaccagtccgtgtcaatgggtttgcttgcaagaacccgatggaggtcaatgcagatgacttcttcaagggggccaacctcgacaagcctagggtgcccaacaaggctggatccaacgtcactttgatcaacgtgatgcatattgctggactgaacaccctcggcatatcaattgcgcgcatagactatgctcccttgggccaaaacccaccacatacgcaccctcgcgccactgagatcctcacggtgctcgagggaacactg

SEQ ID NO: 8950 - DNA, 64 bp, Triticum aestivum
  Clone ID: uC-tsrow189054d07b1
tcacgcgtccgcccacgcgtccgctggaataaaagcccatgcaggtctcaacatcgtccagtag

SEQ ID NO: 8951 - DNA, 439 bp, Triticum aestivum
  Clone ID: uC-tsrow189054d09b1
gtttgagacccgaggcggagatggatctgctggagaggagcgcagccactattaaggcggagcagcagggggaggcccagcgcaaggaagccgagaggaaggagcaggagcaggagcaggagacccagcagcaaggccaagggctcaccggcagacccccgctcgccaacggcaggtctggaatgttgccaatgtcgagccctccagcaaatccgggacagcttaccattttttatggtgggtcagtatgtgtgtatgactcagtgccaccagagaaggctcaagcaatcatgctcattgcagcagcagctgctgcggcctcaaaaagcaatggcaccgctgctgttaagcctccagcgatgtctgcgaccaatgcgatccaagccatgcttacgcggtcgctctcactccagagcacttctgtagcaaatggacaacc

SEQ ID NO: 8952 - DNA, 355 bp, Triticum aestivum
  Clone ID: uC-tsrow189054d10b1
ttataggagcggagccgccgagccgggaagagccaccaccccatcccatcgcccgcctccgcttccgaagggtcagagatggcggaccgagctaaccacccatctgtcatgcagaagtttggtggacagttccaccttgcctccagcttctctgagggtgttcgtgctcgcaacatctgcccttctgtgccatcctatgagaggcgcttcaccacaagcagctacatgactcagaaccttggcatcagtgtcccaatcatgtcatcttctccaatgtttgccaatgcaccccctgagaagaaaggtgtcaagaactttgcgattgatttcctcatgggaggagtgtcagctgcag

SEQ ID NO: 8953 - DNA, 332 bp, Triticum aestivum
  Clone ID: uC-tsrow189054d11b1
ttttccttctctccctagtagcttcattcttcttcttcttccaaacagactggagttcatcaaggatctcgtcctgaaactggagcctacaagcactcaaaggaagaagagcaagaagacaggctcccagccgatacaaggtaggagcgaacaacgttagggtactgtcgttatatcctgagttgatatggtgacagtgagagaagagacacgcaaagggccatggacagagcaggaggacatgcaactggtatgcactgtccgtttgttcggtgaacgccgttgggatttcattgccaaagtatcaggcctcaaccgcacaggaaagagct

SEQ ID NO: 8954 - DNA, 427 bp, Triticum aestivum
  Clone ID: uC-tsrow189054d12b1
tttctttatgatccaattcaatagcagcttgtctgcgattgttttttcctctgcgcgtgtatgctgcctgatctgtatttcttgatcagattgctgttgtaccgaatcattgagatagcaaatacatgtagcttagtgtcagatgtacttgatttattaccctgagctatgtttctcctagataataagcatttcaggcagcttggaaaccgaatccttagatcaatgaaatctgtagacttttatgttacatatgcatggacctatagtctataatatcttcaatgaaaatatatgctgctgccatagaagcttatcgaagctaggtttctcttagatactaagcatgtcaggcagctatgtagaatccaaatgaaatatgtagaaatttatgtactgtctgtaatatcttcaatgaaaaaatatg

SEQ ID NO: 8955 - DNA, 138 bp, Triticum aestivum
  Clone ID: uC-tsrow189054e01b1
ccacaatctaccaaactctcttggagttcacgagcggcgctgcgatggggtcacacggcaagccaccgctaccgtacgcgtacaagccgctgccctccggcgccgccgccgccgacgccgatggtgagcggaccggct

SEQ ID NO: 8956 - DNA, 190 bp, Triticum aestivum
  Clone ID: uC-tsrow189054e02b1
ctggtctcgtgggcggccatttctcggtcatctactagcaccggtcttgctatatatatatatatctctaccaaacgaaaccaaacccatcgatcgatcgcctgccttccttccagcatatacatcgacagacggtcgaagaagatggccatgccgccggcggagaaggtgatcatggtggacgccaacc

SEQ ID NO: 8957 - DNA, 274 bp, Triticum aestivum
  Clone ID: uC-tsrow189054e04b1
ttgtcgcgtgggcggaggcgatagcacaggagaggaaagaagccaagaggcggggccgtcggtccaccgagcccgagagcaccttggccgacagcatggcgctgctgatggagcccgggtcggagcccctgacggagggcgagaaggccgacctggacgccatcctcgacatcaaggagtcggtggagcgcgagtacagggaggagggcaaccaggtcggcaagaagggccggaagcactaccccgacgacgacgactgctacaccaagggcat

SEQ ID NO: 8958 - DNA, 419 bp, Triticum aestivum
  Clone ID: uC-tsrow189054e05b1
tgttgctcgactcgcagcagcagcagccggcggagatcgtatcatggcgatggagggctacgaccgcgagttctggcagttcggcgaccagctgcggctccagacggccagcttctccggcctctccctcggcgactccatctggtcccccgccgacgccgccccccgcgcccgcaacgccgacctcttctccccctccccggcgcccgacaacaacaacgccgccaagatgaacggcaacggcctcaacgggcccggcctcatcgggtccggcaagctcgccttcggcgccaccaccaccagcaaggccgaccgctacaacaacgtcagcctccccgccgtcgtcgacgccaacgccaagccctacggcaacgccaacggcctatacggtgccaagcccaacaacgccaccaacaacg

SEQ ID NO: 8959 - DNA, 316 bp, Triticum aestivum
  Clone ID: uC-tsrow189054e06b1
tttgactccccgcccagctatagacaagcgcgcgccccgatcgaagggatggccggcaccgttgaggacagcgggaacacggcgccgtcgtcgccggccgggctccgcggcgccgacctggccctgagggtgcttctgttcgccgtctcgttgtcggggctcgtcgtgctggtcaccgtcaagcagacggagatggtgcccctggtcctgacgccgccgttcagattcgggccggtgcccgcccagttcaaagactcgccagcgctcatttatcttcttgtggcgctgtgcatgacgagcttgtatagccttctga

SEQ ID NO: 8960 - DNA, 414 bp, Triticum aestivum
  Clone ID: uC-tsrow189054e07b1
gacccaaatgttagataaatgttcccttggttacttgggttggatatgtgatacatccctcatggcaccgtccggcatgcccctgcttccaagagatacaaatcatgactgtcctccggagttgaagcatttgtcaaaggaaatagttaacaagtgcaaaggcttgcctcttgttattgtgttagttggtagccttttgcgtgtgcgtgagaaaactgtggaagaatggagaaaaataaatgaccaattgggttgggagctaattaacaattcgaggttcgatcacataaggaatgttttgcatctgagtttcatgtatcttccaacacatttgaaaagttgtttcctgtactgcagtttatttccagaagactatattttcaaaaggaaagaacttgtacgattatggatagc

SEQ ID NO: 8961 - DNA, 122 bp, Triticum aestivum
  Clone ID: uC-tsrow189054e08b1
tctacgcgtccggtattctgcaccggccgacagcttctgagatttgatctctatccctatatgcaattaatcttagttaagcaagcaagttactagctgctagctaacaagaaatagaaatg

SEQ ID NO: 8962 - DNA, 339 bp, Triticum aestivum
  Clone ID: uC-tsrow189054e09b1
tattgcgccttcttcgactacgccagaggaaatgccgtcggcatggcaccgggcgcgcgcatagccgtctacaaagtgtgttggaaagggtgcgcgagctctgacatcctcgccgcgtttgatgaggccattgcggacggtgtcgacgttatctctctctccctcggctccaacggcaaggccccggacttttatagcgatacgaccgccgtgggtgcgttccgcgccgtcagcaagggcatcgtcgtctccgcctcggcgggaaactccggccccaaagagtccaccgtcgtcaacgtcgcgccatggttcttgacggtcggcgcgtccactctcaac

SEQ ID NO: 8963 - DNA, 345 bp, Triticum aestivum
  Clone ID: uC-tsrow189054e10b1
tgtgatagagagagaaccgatttgcctgagaagtgactcagtcccatgcttgtccccttcacttcctctatctctcactcacaggcgatgtcgacaaggacgagacggagatattgggtgcgaggggagctccagaaaacgatggaggtgtgcccgtcccgtcccgtggtcgacagggcgtggcactcctgtcaccaggaaagggattcaaatttagagtctggctatggtgagggccgtagtgcatgagggagaagctggggcgatggattcacgagaaactcacccaaacgccttcttcagtagctgcctgggcggacggcgccggctcgacctacagcgaac

SEQ ID NO: 8964 - DNA, 259 bp, Triticum aestivum
  Clone ID: uC-tsrow189054e11b1
tttcccgccgcgccgatccccccaccagcgcagcagcagccatggcgaccgcctacaaccttcggtcccgcgacgagccggacgacttcgacgagttcgactccacgccctacggcggcggctacgacctcttcgtcaccttcggccgcccgctcccgccctccgacgagacctgctacccctgctccgccccctccacctcctacgacgcgccccactacgccgtcgaggagccctccccctacgcccaccaccagaa

SEQ ID NO: 8965 - DNA, 327 bp, Triticum aestivum
  Clone ID: uC-tsrow189054e12b1
ttcacgcgtccgcccacgcgtccgcccacgcgtccgcccacgcgtccggcagacctgactttgactgtagaagtactgaagaaaccgaggcttggttcatagattcttttgaggaatggcgcaaagcaaaaaacctcagtaattttatattgcttggtcattctttcggaggatatgttgcggcaaagtatgccttacagcatcctgaacatgttcagcacttgattttggttggttctgctggcttttcgtcagaaacagatcatagttctgagtggttaaccaagttccgtgcaacgtggaaaggcatgctagtaaaccatcttt

SEQ ID NO: 8966 - DNA, 242 bp, Triticum aestivum
  Clone ID: uC-tsrow189054f01b1
agtttccaaacgccctactttaattttaattatcgccgctgctcccacgcgccttcacgtacgtaccgacgacctttcgctcgcttttcttccgcctagtctgcccgccagatctgcatccgcggagatgaagatcacggtgcggggatcgacggtcgtggtgccggcggaggagacgccgcggctccggctgtggaacgccaacccggacctggtcgtgccgcggatccacacgccgagcg

SEQ ID NO: 8967 - DNA, 257 bp, Triticum aestivum
  Clone ID: uC-tsrow189054f02b1
ctcttcgtccgcccacgcgtccgagctcctctcccccgctctcctccacccctcccatggccgcccccagctcctgggcctccccgttccacgaaaagagagcttagcgctgccgagccctccgtcctctccacttcccggctgctttctccgtccgtccggtcgtcaatcttcgtcgagcagagagagggagggaggaggtcgtcagattcgcgcgagatccatggggaagtacgtggagctgctggacatggggg

SEQ ID NO: 8968 - DNA, 363 bp, Triticum aestivum
  Clone ID: uC-tsrow189054f03b1
ggcttccaattggtcaacatatcagttgcagaggtcaagatgctacaggtgaagaagtaatcaagccttacacacctactacattggattctgatctcggaaattttcagcttgttataaagatgtaccctcaaggaagaatgtcgcatcacttccgtgaaatgaaagttggtgattatatgtctgtgaagggacctaagggtcgtttcaagtaccaagtaggacaagtgagagctttcggaatgctggctggtggatctggcattactccgatgttccaagttgcaagggcaattctcgagaaccctaatgacaaaacgaaggggcatctagtctatgcaaatgtcacacctgaagacattc

SEQ ID NO: 8969 - DNA, 385 bp, Triticum aestivum
  Clone ID: uC-tsrow189054f04b1
cttttcccctaggctctccttcgccgtcggtcgggctccctctccgacacgccgccgtcgatacatccacccgaggcatggcgacggcgttcaaggcgttcgtgaacagccccgtcggccccaagaccacccacttctggggccccgtcgctaactggggcttcgtcctcgcgggtttggttgacttgaacaagcctcctgagatgatatctggcaatatgacagccgccatgtgtgtgtattctgggctctttatgaggttcgcgtggatggtacagccccggaactacttgctcctggcatgccatgcctccaacgaaaccgttcagctctatcatttatctcgctgtgctagggctcaggggtatctggattccaagaaaga

SEQ ID NO: 8970 - DNA, 354 bp, Triticum aestivum
  Clone ID: uC-tsrow189054f05b1
gtcatatgccctttcaaactgctgatgagtttccggtgaacacagtatcaatcaggtttcctcgtctatagtacttttccttcatcaatcttgtacacaaactatctggtcgctcaatcaaacgccaagcttgcctcgaaagcaaagcctggttaaagaggcccatgtcacgaaaaccgagaccaccttgattctttgggagaattaatttttcccatgcaatccagtgtgtcttatgttttcctttctccacaccccaccagtacctccggaccatcttggtcagttcatcacacaccgacaatggagtttaaatacgctcataacatatgtcgggatagcattagcaactgc

SEQ ID NO: 8971 - DNA, 311 bp, Triticum aestivum
  Clone ID: uC-tsrow189054f06b1
gtttgacagtaatgttgtccaacaaggaattgataaatgcccattcctgaggaacatcaacgagcctacaagtttttccttgacatccattaatttccccactccggcaaccggagcaaagggtccaatttttgaagacgggcccaactttgacacggcatttcgagttttccacggcagagacggggttgttccactttcagaaggagcatttgctcatattgagaagcctctgccaaagcccgctccagaatttaaccccttggcagccaaagcagctaccatcagtctctcaggattcggaggctttt

SEQ ID NO: 8972 - DNA, 261 bp, Triticum aestivum
  Clone ID: uC-tsrow189054f07b1
ctcacgcgtccgcccacgcgtccgctcggccccgccatggaggtgttctactacctcgtcttcggcggcctcgccgccgtcgtggcggcgctggagctcggcaagtccggcaaggaccgcgtcgccaccccgacggccttcaactccttcaagaacaactacgtcctcgtctactccctcatgatgtctggggactggctgcaggggccctacgtgtactacctctacagccagtacgggttcgacaagggcgacatcggc

SEQ ID NO: 8973 - DNA, 302 bp, Triticum aestivum
  Clone ID: uC-tsrow189054f08b1
tttgtatcaacgaggacaacacggtcatcaaccgcgagggcctgatgaacatccacatgccggcctacttcgacgctctcgccaagggcgtctccaccgtcatgatctcctactccagctggaacggggtcaagatgcacgccaaccaagatctggtcaccggatacctcaaggacacgctcaaattccagggcttcgtgatctcagattggatgggcattgacaagctcacgaccccttatggggcggactacccctactcggtcaaggcttccgttcttgccggccttgacatgatcatg

SEQ ID NO: 8974 - DNA, 280 bp, Triticum aestivum
  Clone ID: uC-tsrow189054f10b1
ttgagagccatcgcggcaaccacaaacaaacccagctgaaaggcgcacacaccaccgtgcaggttacatgggaggaggccgcggtctggtcaccgggttctacgtctggggctgggagttcctcaccgcgctcctcctcttctccgccgccctctcctgctagcttctcgatcaacccttgaatcttgattgattataatccagttctacgcatacatagatacaccaaacttactagtattaggtagagagacatctgttaggtgattgtgattgagcc

SEQ ID NO: 8975 - DNA, 400 bp, Triticum aestivum
  Clone ID: uC-tsrow189054f11b1
tttgctcgtgacgctcggcctccccatgatcctcgaggagccgctcctccacaccgtgcacctcccgcccatcctcgtcagcggcgactacaaggcgctgtacaagtacttctacgccgccgcgaccaaggcgctcgacaccgccgagggcctcgggctgaagcgggacgaggcatgccacaacctgctgttcgccaccgtcttcaacagctacggcggcctcaaggtgctgctcccggggatcctcgcgcgcatcgcgggggccggagagaagttccaccagaagctcgtcgcggagatacgcgccgccgtggctgacgccggcggcaaggtgacgatagaggcgctggagaagatggagctgaccaagtcggctgtgtgggaggcgctgcggctggac

SEQ ID NO: 8976 - DNA, 109 bp, Triticum aestivum
  Clone ID: uC-tsrow189054f12b1
tccacgcgtccgcccacgcgtccgtctcagcagaaatctttctttggttttggaacccctggtgactcatatggaagaggcttctctcatagtggtgggttcccacagg

SEQ ID NO: 8977 - DNA, 169 bp, Triticum aestivum
  Clone ID: uC-tsrow189054g02b1
gctccgcgctgctgcacgtcgtctccgggtacaccacgccggcgccggagttcttcttcccggcgagcaagcaggcgtgctcggcgtgcgggaaggacggatgcctcgggtgcgagttcttcggcgcggaggccgggcgcgcggtcacggcatcggacgcgccgagagc

SEQ ID NO: 8978 - DNA, 353 bp, Triticum aestivum
  Clone ID: uC-tsrow189054g03b1
gtgttctcagctgaagaaatttcttccatggtcctcatcaagatgcgtgagatcgctgaggcttacctaggagtaactattaagaatgctgttgtcaccgtgcctgcttacttcaatgattcccagaggcaggcaaccaaggatgccggtgttattgctggtcttaatgtgatgcgtatcatcaacgagccaacagcagctgcaattgcttatggtcttgacaagaaggctaccagtgtcggtgagaagaatgtgcttatctttgaccttggtggtggcacttttgatgtctctctccttaccattgaggagggtatttttgaggtgaaggccacggctggtgacactcacct

SEQ ID NO: 8979 - DNA, 356 bp, Triticum aestivum
  unsure (1)..(356): unsure at all n locations
  Clone ID: uC-tsrow189054g04b1
anttcaatcaccgtgtgtgacagaattaaacatggctatgagaggcaacaatgtcaagaccattgtgatgatgctcgtagttgtgggtgttgtggccatggagcaaacccagcaagtacaagcatcccactgttgttatgatctcaactcggtcgatacctattttaagtgccgcgcaaaatctgatagcactgtctcagagtgctgcggtgtttccgctggctatatatcagaagccgctggatttgaatgcaagcccggttatatagatatagagactgcactgtaagccaccaactactgcaagattgggtgcacggctttcttgtgcaacaaattaactccttctgggaaag

SEQ ID NO: 8980 - DNA, 326 bp, Triticum aestivum
  Clone ID: uC-tsrow189054g05b1
tgcgcaacaacaaacaacgctccctgtgccaactcacagcacattactgtactgtacgaccggagtaccgggcaatgatttcaaacaatggctacagcctggacggggcagcgcctctgccccggccgtacggggaaattcaatggctgctgactgaccccgtcactgtgcaaatctctgcatacacacgccccaggagtaaaaactcgtatttttcacctcccgacggtgaatgaacttacaacaatttcgctatcgctttgctaaattcgggcgcaaaattgacctgcatcatggcctagctttctaccggtaaaacacttttt

SEQ ID NO: 8981 - DNA, 219 bp, Triticum aestivum
  Clone ID: uC-tsrow189054g06b1
cctacgcgtccgcggacgcgtgggctcctcagcatcttctcatctggcgacgaagaggcgacgtcggggcgctcctgctccgtcgcgacccccacgcccttctgacctatgtcggatcagggaatacatgctgcttctgttcgagacaccctctggctttgcagtctttcttttttgtgggtcactcattaacccacctagatctttggaggacatatg

SEQ ID NO: 8982 - DNA, 107 bp, Triticum aestivum
  Clone ID: uC-tsrow189054g08b1
ctgacgcgtgggcagcgcgtcgggcttcgtcgccgaggtcgtcaccctcttcatcgacgacgccgaccggatcatcgtcgacatcgggagcctgttggaccagcccg

SEQ ID NO: 8983 - DNA, 386 bp, Triticum aestivum
  Clone ID: uC-tsrow189054g09b1
tttggctctcctcaagaacttcgccgctttcctgtgcgtgatcctggccacgctcgccttcgtcgcgcaggatgcgctcgtcgccagaggtgctttgaacaacgtgaagggatacacgggtacctacacaggcaacccaggcggtggttacggcggtggttatgggaacgggaagtatccatgataggccgcatatgatgatacttggagcacggaaatacaaaatacgtacggcagaccatgaataaattatcacccgttactggtatatcgtactctctctgatccataataagtctcgcagttttgtaccaaggtcagttcaaaccttaatacaaaactgcaacacttatcttagattggagggagtaccaaaaacatagtga

SEQ ID NO: 8984 - DNA, 224 bp, Triticum aestivum
  Clone ID: uC-tsrow189054g10b1
tacgcgttcgagggatttcatctccaacggcgttgatggaatatggaatgatatgaacgagcctgctatgacaactactactaaaacaatgcctgagagcaatatacatagaggagatgctgatattggtggtgtccagaatcattcttactatcataatgtttatggaatgctgatggcaagatctacttatgaaggaatggtgatgtccaatacagaaaagc

SEQ ID NO: 8985 - DNA, 213 bp, Triticum aestivum
  Clone ID: uC-tsrow189054g11b1
tgaaggggaccgggaagtggacggtgcagcaggcggcggagcttgcagtcgctgcacccaccattgcagcatcactggatgggaggtacttgtcggggctcaaggatgagcgagttgcagccgcaagtgtgctagaggaagaggggatgccagttgggcttctggagaagattaatgtctataagaaggagctggtggacagggtgaggtagg

SEQ ID NO: 8986 - DNA, 195 bp, Triticum aestivum
  Clone ID: uC-tsrow189054g12b1
tgtggccaccatttatgcccatcattcatcatgacattttaaatgagataccaatccacctacaaaggatgcagtaccttgcattttgttcattgttgggattgacgttatgcctcttttggaacatcattgcaactaccgcagcatggattaaaggggcaggtgttgtcatctggttgctagcaattatttact

SEQ ID NO: 8987 - DNA, 253 bp, Triticum aestivum
  Clone ID: uC-tsrow189054h02b1
gtttgtatgctgaggaacaagcaggcagtccgggatgcggcgatcggcgatggcgctccgctccacggcggaccggtgcttcggccaccactcaccgttgacgaacggtattcaatcaacattcagtgcaaacgtcggttcaagatggggaagtcttgcaagagctttcagtgcaaaaccacttggaaatgaggttattgggattgatttgggaacaacgaattcaggtgtttctgttatggagggaaagaat

SEQ ID NO: 8988 - DNA, 172 bp, Triticum aestivum
  Clone ID: uC-tsrow189054h03b1
ctactgcacccggaagggctggcccaacagtgtgggttttggcacctaccagagagccagcatcacagataatggacgaagctgaggcattgggcggatcatcaagaattgcttctacgtgcctttatggcggagctcctaaagggccccagtttagagatttagaaagagg

SEQ ID NO: 8989 - DNA, 346 bp, Triticum aestivum
  Clone ID: uC-tsrow189054h04b1
cctctcgtccgcggacgcgtgggttcagctaagctaaaagtgagtgttgtcttaaagtgagatggagcaatatgaaaagcttccaaaaggagatatggtattagaggccctatacaacaactgcttgcaactggtggacacttcgctgagccatttggcaactgagccatcagttgacaaagcacacgagactcattctgtaccattttcattatatgctctctctagaatgggatttaacttgctgaagagaaaaaatgaaactgaaaaggagataagctcttgtgctgtttgtgttggtgcgacaaaatctgtggaggctgctgtgcaagagtcatttctttat

SEQ ID NO: 8990 - DNA, 442 bp, Triticum aestivum
  Clone ID: uC-tsrow189054h05b1
cctattcgtccgggattcgatttggatttctagggtttgctcatcctcatccccatcccctcctccgtcgccggacgtcgtcttccccacctccgatcaaatttgggatttttcatcgatttccataagatatgatccccaactccttcgacaccttgctctgatctgtccccccaggaaatcccacatccagattccacatactatggtgcgccgccgcccgtcttcctcctcctcctcctcgtcgccgatgctccacaagaacctccgtgcgctcggccccggcctcaatccgtttgcccccttcggcatgggcaactactcccgctaatcccccctcccctcccctctcctctgctctgatttgcttttctccccggatccgatttgcttctccccccttctcgttcttgatttgattggattggattgctcctctctc

SEQ ID NO: 8991 - DNA, 317 bp, Triticum aestivum
  Clone ID: uC-tsrow189054h07b1
taaaataaaactctcgacgcataccagatttttaagtttcatgatggcgtcgttgaagatgttgcttggcatttgaggcatgaatacttattcggctcagttggtgatgatcatcatctcctaatttgggatatgcgtagtcctgcacctaccaagcctgtacagtctgtggtggcacaccagggtgaggtgaattgcctggctttcaatcctttcaatgaatgggttgctgtaactggttcaaccgacaagactgtcaaattatttgatcttcggtagattgatactccgctgcacacttttgattgtcacaaaga

SEQ ID NO: 8992 - DNA, 306 bp, Triticum aestivum
  Clone ID: uC-tsrow189054h08b1
atggaaacctagctaagaccgaaaactccaatagcagtccagcagaaaactaaatacatcaccagcatcaatggccaggtcacaggcattggctgcaacattgttgcttgtcctggtggtgtcccttgccgcaatagggagtgttcatggcgtttgcggtatgtcaaatgacgaattcaagctttgtcagcccgcggcggcagtgaataacccaacaaacagtccatctgctgagtgttgtgccgcgttaggaaaggcaaacctatcatgcatctgccgctacaaaggcatggccggtatatggct

SEQ ID NO: 8993 - DNA, 184 bp, Triticum aestivum
  Clone ID: uC-tsrow189054h09b1
ctacgcgtccgcaaggtctggcccaacagtgttagttttggcacctaccagagagctcgcaacacagattttggacgaagctgtgaaatttggcagatcatcaagaattgcttctacgtgcctttatggcggtgctcctaaagggccccagttaagagatttagaaagaggggttgatgttgtt

SEQ ID NO: 8994 - DNA, 371 bp, Triticum aestivum
  Clone ID: uC-tsrow189054h11b1
ttctgcgatacgagatcaacaggggcttcgctagcctgtgggcgattggtcaaggccgtgacctgaagaaattcctgattgtggttgcaggcctgtggatcctctcttttcttggcagctgctgcaatttcctgaccttgctctacataggtaaatgtggtttcttgctacagtctgtttgttacttacatatgtgcaataagcttgcctagcattgtttcgctgatcatgccttcttgtttgcagtcttcatggtgctttacaccgtgcctgttctgtacgagaagtatgaggacaagatcgatgcttttggagagaaggccatggtcgagctgaagaagtactacgccatcttcgatgagaagtgcctg

SEQ ID NO: 8995 - DNA, 192 bp, Triticum aestivum
  Clone ID: uC-tsrow189054h12b1
ctcaccaacctcgcggaaaccctaggcgagcgggagccttctccgatcccctctccccgatctctataaaacaccgcggatttcgaattctgtcttccccgcgggaatcacaccggcgcctcctccctcggcgcgcccggaccgggctcctcccgcggggccggggctggcaccaggggcggcggtgggggg

SEQ ID NO: 8996 - DNA, 67 bp, Triticum aestivum
  Clone ID: uC-tsrow189055a01b1
ttgcttctggtcagaagtcaagtgtgacagtaaacacagaaaatgttaagaaagctgttgaggtttc

SEQ ID NO: 8997 - DNA, 124 bp, Triticum aestivum
  Clone ID: uC-tsrow189055a04b1
tcttcacgcgtccgcccacgcgtccggcagaagatgcccatctgcaatcagccaatggagcaacatcgggatgacctggacttgtttatgcctgggcagaagacgtcaaattgatgggtccgac

SEQ ID NO: 8998 - DNA, 165 bp, Triticum aestivum
  Clone ID: uC-tsrow189055a06b1
ttctttagcagaagcaaagcatccgaacttccgaggcgaggcagatttggttcgcggggcggcgtcggaggaggcaccgtcggcggtgagctcggccggctctaccgtgcgcgggaccgatacgtcgtcctccgccggcgcgagcaatggcggcggcgccgcggg

SEQ ID NO: 8999 - DNA, 352 bp, Triticum aestivum
  Clone ID: uC-tsrow189055a07b1
ttcggccacggcttatctaaaagaaccatggaagatgggtgtgcacaaaagaaatggtgttgtataccttgatgtccataaactccctgaaagaccacagagtgaaattgaccgcaggagatgtttttggggctattcttttgaaaatcttgccactgagaactccattgacgaagaggaagcggtattgatgctaatgtagagtattgttctgtaataaagacgaaattgggcgcgcatcgcattgtcatgggtgctgagatggactgctgtgattcaaccgacgatggagggcggttcttgtgggagttgaaaacaagcagagagctggagtatcatacggtggaaaaat

SEQ ID NO: 9000 - DNA, 305 bp, Triticum aestivum
  Clone ID: uC-tsrow189055a08b1
tttccacgcgtccgctccgcgagctcatctccaactcctccgatgccttggacaagatcaggttcgagagcctcacggacaagagcaagctcgatgcgcagcccgagctcttcatccacatcatccccgacaaggcgaccagcacgctcacgatcgtcgacagcggcattggcatgaccaagtcggacctcgtcaacaacctcgggaccatcgccaggtcggggaccaaggagttcatggaggcactcgctgcaggcgctgacgtgtccatgatgggcggtttcggtgcttgggttctactccgc

SEQ ID NO: 9001 - DNA, 253 bp, Triticum aestivum
  Clone ID: uC-tsrow189055a09b1
ttctttccacgcgtccgggaaaggcgtcttcgaactcgcctctctccgcgcaaccgagccttcgccctcctccttccccattgcgacagcggcgcagcccaccaaccacccccacccgccggcatgagggagtgcatctcgatccacataggccaggccggcatccaggtcgggaacgcgtgctgggagctctattgcctcgagcatggcattcagcctgatggccagatgcccggtgacaagaccgctgggg

SEQ ID NO: 9002 - DNA, 384 bp, Triticum aestivum
  Clone ID: uC-tsrow189055a11b1
ttctcggcggcggcgcgcgcataggaggcgaagcagcatcggagccaagccaccgacgccaccatgggtatctcgcgtgactccatgcacaagcgccgggccaccggtgggaagcagaaggcgtggaggaagaagcgaaagtatgagctcggccgccagccagccaacactaagctttcgagcaacatgacagtgaggagggtccgtgttcgcggaggtaacgtgaagtggagggctctccgtctggacactggtaacttctcatggggtagtgagggctgtgacccgcaagacccgtctcgtggatgttggtttacaattcgtcaaacaatgagcttgtgaggactcaaacccttgtcaagaatgccattgtgcaagttgatg

SEQ ID NO: 9003 - DNA, 164 bp, Triticum aestivum
  Clone ID: uC-tsrow189055b01b1
tcatcgcgtccggccccgctgagcgagcaccagatgcgcctcacgcgcgccctggccaagaggcccaagaccaagatgctcaccgggttcggcgtcaaacccaccgctgctttctccaagccggcgcagctgcaggcgcaggcgctgatgtccggtgcgcagtc

SEQ ID NO: 9004 - DNA, 312 bp, Triticum aestivum
  Clone ID: uC-tsrow189055b02b1
tcttcgccagtcgccgccacctcccacctaccgtcccgtcatcatcatccatcctcatcctcctccaagaacccggcagaatcatcgcgagagcaccatgtccaatcacgactccgcgtggccctcattttgattgatcttaagctgcagctcggggattggctcgctgttagcctgtcggaccacccctccatggcgcccgaagtgaaggtgccgctgctggagggtagggggtcgcgacgcccgcgcagacgttggggaacatcgtcgtgtccatcgtcggcaccggcgtgctcggcctgccctacgcct

SEQ ID NO: 9005 - DNA, 322 bp, Triticum aestivum
  Clone ID: uC-tsrow189055b03b1
ttcttcgccgccgtgcctactactcgcccaaggttggagcttgtgaaagttctctaaggctgacaagatggttctgaagaccgagctctgccgttttagcggccagatgatttaccctgggaagggtatcaggttcattcgttcggattcgcaggttttcctctttgccaactcaaaatgcaagcgctacttccacaaccgcctgaagcctgcatagctttgctggacagcaatgtacaggaagcagcacaagaaggacatccatgctgaggctgccaagaagaggcgccgcaccaccaagaagccgtactcacggtcgatt

SEQ ID NO: 9006 - DNA, 320 bp, Triticum aestivum
  Clone ID: uC-tsrow189055b04b1
ttcgtcggccaaagcttgaccatacccttgttccttcaacatttgacggccggcaagctcttgtcctcagtgcagcgaaggcagacggccatggacggacacagcccggtgatgacggacagcgagcggagggcgtaccggtacatgcaggcgcccaaggtgcagggcctgggcggcatcaagaactcatggtccaacgactccctcttcagcctcagctacgccggcgcggggggcagggctcgtcgtccactcgtgcgtctgcgcgcccaccacgcacccgggctccttccgctgcaagcaccaccgccagagcgccg

SEQ ID NO: 9007 - DNA, 330 bp, Triticum aestivum
  Clone ID: uC-tsrow189055b05b1
ttgttcagtttcaaactggagccgaagggtcaaagttaaggagggatgtttccgcacaaggcaatgttggtgcagggccctctactagaggtctagtgtcaatgctgtctggtcaagaagagatgttcgcgttccaaagggcgatatctcggctcgtagaaatgcagaccccgctgtatctcgagcgcgtccagcatgtccattcttccgcccttcaacaacagcagggcacccctgttctcgcataacagagcactggatcctcagtctgctccctggtagactggtagtactattctattcattcttggaaaataatcttgcaactgt

SEQ ID NO: 9008 - DNA, 330 bp, Triticum aestivum
  Clone ID: uC-tsrow189055b06b1
tctttacgcgtccgcccacgcgtccgccacgcgtccgggatgaacaaaatgtcgcaggccttacataggtttgtggtgctgaattcatagcaacgtaatttaggatgggtgattttatccattgatgatgatagcaaattgtgctaaggcttgggctcaatagggaaagaaagagagagagagagagccctttttatacttgggataggcatacaattggaaattttggttggctattgtctgttggttcattgtctagctataatgttttgcttcgctgcctaaatgcggctttgtagcctgaataatgtacagattttttggttgctc

SEQ ID NO: 9009 - DNA, 343 bp, Triticum aestivum
  unsure (1)..(343): unsure at all n locations
  Clone ID: uC-tsrow189055b07b1
ttttgaacgccgccgtgcagcctagctcctccttctctcctccaaccttttcccccctgttctgcaagccctttccgtctacttctggctgcttcctcgcgcaggtgctattatttctgagcttccgaggcgacagagctgcacaagagcagagcagagcacgcatagggagagagggagatgagnggagatcataagcatccacatcgggcaggcgggcatccaggtggggaattcctgctgggagctctactgcctcgagcatggcatccagcccgacggcctcatgcccagtgatacctcggttggggttgcaaaggatgcattcaacacattcttcagc

SEQ ID NO: 9010 - DNA, 392 bp, Triticum aestivum
  Clone ID: uC-tsrow189055b08b1
tttaaggaggtgaggaccaggctgatgaacatcatccaaagcgtcttgccaccaaagacaccatgggctacggcaacgacctgcttgggcttatgttggaggcgtgcgcggcagagggcgggcataatccgattttaagcatggacgagatcatagatgagtgcaagaccttcttctttgccgggcatgacaccagctcacacctgctcacatggaccatgttcttgctgagtacgcaccctgagtggcaggagaagctcagggaggaggtgctaagagaggtgggcagttgaggttcccaccggtgacatgctcaacaaactgcacttgctcaacatgttccttctagaaactcagaggttatacgcccctgtgtcactcattcagaggta

SEQ ID NO: 9011 - DNA, 411 bp, Triticum aestivum
  Clone ID: uC-tsrow189055b09b1
tttcggtcgcgtgggtacaaattgagcaactcatggaccaggaagttattaatttatcaggtggagagctccagagagtagcattatgtttgtgccttggaaagcctgcagatatttatttaattgatgagccaagtgcatatctcgattcagagcagcgtattgttgcctcgaaggttatcaaaagattcatccttcatgcaaagaaaactgcatttattgtggagcatgatttcattatggcaacctacttagcggacaaggttattgtttatgagggacttgcttctattgactgtactgccaatgcaccacagtctttggtatctgggatgaataaattcttatcgcatcttgacattacatttagaagagacccgaccaactacaggccacgaatcaacaaactgg

SEQ ID NO: 9012 - DNA, 225 bp, Triticum aestivum
  Clone ID: uC-tsrow189055b10b1
tgttcgaaagtcagctcagaaccaatccagccggaacgccgacgaccaacgatggatgtcgccgtggcgaagcaactcaggcggatccgcacgctgggacgcggcgcgtccggcgccgtcgtgtggcttgcgtccgacgaagcctccggagagctcctggccgtcaagtccgccggcgccggtggcgcggcgcagctggagcgcgagggcagcgtgctcaccggg

SEQ ID NO: 9013 - DNA, 236 bp, Triticum aestivum
  Clone ID: uC-tsrow189055b11b1
tgtggtctgaggatcaacgcgcgcggggcctctcaccaaccaacccaggaataagctcaccgtgtgcgcgtcggggtcgacggtggtgcagcgggcgaggaggaagtaggtgccgggggagtcggtgacggggggctggatgcgcgcgagcggctcgtcgacggagcggaactcgagcgtgccgacgcaggtggaggcgagcagcggcgtgaagaccatgtggttgcgcggggaga

SEQ ID NO: 9014 - DNA, 209 bp, Triticum aestivum
  Clone ID: uC-tsrow189055b12b1
taggacgcgtgcgtgactgtcttggatgtcctgccatccacaaagcttgtgacgtctggcaagcttcctgattacaatgctagaaaggtgggggtgcaatacttccatgaccatgcaactactgctgccgctgttggcatgaagccctctcctgtggtcgatttttcttgggtagtgggccctaaaggacttgccttcggtggggaagc

SEQ ID NO: 9015 - DNA, 105 bp, Triticum aestivum
  Clone ID: uC-tsrow189055c04b1
tcgttcacgcgtccgctttcctggaggcatgggttgctggggtaaaataccctccgtcgatggacccttcgtttgagctgccggagtccgaggtgagggagaggt

SEQ ID NO: 9016 - DNA, 266 bp, Triticum aestivum
  Clone ID: uC-tsrow189055c05b1
ttctccacgcgtccgggccatggtggtgcggcctgctcaggaccgagggtggtgtgttcttcttcaggtgtttctcttcggctgccctacctgtggtctctggcctgctctatgcatgctcatgcccatgctctgttgaggcgagcctcaggctcttggtctcgtcttggttcatctttgcttaatgacgacgcaatgacgcctccccgacttgctaatcgtcttgaacttccgtggcggagcgctcagtcaaggactgttggcat

SEQ ID NO: 9017 - DNA, 442 bp, Triticum aestivum
  Clone ID: uC-tsrow189055c07b1
tcggctaaatccggggctggttcccgggccgttgctccggcgatcaggagcgcttccttcgttggttacaccaagcaaacaccaaacttgtcaggcctaaggatgtcaaacacgttcagggtgtctgccacggccgtgcacaaggtgaagctcataggcccggacggagaagagcacgagtttgaggcccctgaagacacctacattctcgaggcagctgaaactgccggagtggagctgccattctcttgccgcgccggatcgtgctccacatgcgcgggcaagatgacgaccggggaggtcgatcagtcggagggctccttcctcgatgagagccagatgggtgcagggataccttctgacctgcatttcataccccaaggcggattgcgtcattcaaacccaccaagaggaggaactctactaattggctcacatgtgc

SEQ ID NO: 9018 - DNA, 267 bp, Triticum aestivum
  Clone ID: uC-tsrow189055c08b1
tttccctcgtgatgaagaaaggccaggatatgctgccgtgagagatacacaggctcttaatgcttcctatgagcgttttctgcgtactgggcaaattcagtcctatggcgctggacctgctggtggatctgtcaggcctaccgcgggagccagtgctggtggctaccaagctgatgatcgtccgggcatggctgctgggggtatgaatggcaggaatgttgcttttggctggtggaatgcctgagcctccccttcccccagatgcct

SEQ ID NO: 9019 - DNA, 386 bp, Triticum aestivum
  Clone ID: uC-tsrow189055c09b1
tcgagccacggcacaatcgtcaggtcctccgccatgtctctcacggtctagttcgttcgttctcgccaacgcgatggcgacgccggcccgccggccgtcggcgcagcagcagcagccgctgacggtggacttcgaggcgctgagctacatcagcaggctcgtggaggcgttccaggcgttcgactccgacaacgacggcctggtcacggcccccgagctccggggcctcctggcctccctgggcctggacaagtcggaggcggaggcgcgggacatgctggcccgccccgacgccgaccgtgacggccggcttggttggtaggagttcttggacgtgatgaacgcaggcgagctcggcttggggcgcgctcggcgcgctcctgcag

SEQ ID NO: 9020 - DNA, 244 bp, Triticum aestivum
  Clone ID: uC-tsrow189055c10b1
cggcgatcaaggagaatcaagaagccggcgtacagaccgatccatcgatcgacccttgcctgagccggcagcagcagccatgaacaacctgttctcgagttcgtggaagcgcgcgggcgcggggggcgacggtggggacctggagtcggtcggcggcggcgtgcggtagatgacacgtcctacaacgacggcctggtcacggcccccgagctccggggcctcctggactagctgggcctggaca

SEQ ID NO: 9021 - DNA, 320 bp, Triticum aestivum
  Clone ID: uC-tsrow189055c11b1
tcgcccacgcgtgcgccagggtctgctgaaggtgttagccgggatcgacaccaacttcacggttacctcgaaggcaaacgaccaggacggcgactttgcggagctatacgtgttcaagtggaccaggctcctcatccctccgaccaccgtactggtgattaacctggtgggcatggtggcaggcatatcatatgccatcaacagcggttaccaatcctggggtccactcttcggaaagctcttgttctcaatctgggtgatcctccatctttactccttcctcaagggtctcatggggaagcagaaccgcacgccaacca

SEQ ID NO: 9022 - DNA, 79 bp, Triticum aestivum
  Clone ID: uC-tsrow189055c12b1
gcccgacgactcagctgagagacggacgggccctctagggggcggccatcaacgatggtggtggacgcagaggaaatgg

SEQ ID NO: 9023 - DNA, 429 bp, Triticum aestivum
  Clone ID: uC-tsrow189055d02b1
ttcacgcgtccgcaggaatgaaaataacaaaaaagttcaaaaagcatgcagggatttctcataagaattagcacaaatgcctagagggatcaacatagactctcccaagctcacaggcagagctcaggaccatgcatgcattctgcaaatctttatccccccaacgatgctatgtgcttgatgtcttgtacaaggtgggttatgtgctgctgtgttgtttctgtccagtgtgaaaaagtggaatgccataaataaaatagaagaatggaagttgatccccaggaaataaaagaataggaaaacatgcaagttggtagtattattgtatttccaaggctgtagctgtactgatttctgaatgttaaattactctatcagtcttcgttaccatctatctattatatacctatgacagaagacatgatgacg

SEQ ID NO: 9024 - DNA, 281 bp, Triticum aestivum
  Clone ID: uC-tsrow189055d03b1
gtcggcgtcttcgcctccgtctccgccgatggctccgtccgcgtctttgatctccgggacaaggagcactccaccatcgtctacgagagcccccgcccggacacgccgctcctcaggcttgcctggaaccgctatgacctgcgatacatggccgccctgctcatggacagcaacgccgtcgttgtgctcgacatacgcgcacccggggtgcctgtggccgagctacatcggatgggggatgcgtcaacgctgttgcgtgggcaccgcaggctgcaagacac

SEQ ID NO: 9025 - DNA, 374 bp, Triticum aestivum
  Clone ID: uC-tsrow189055d04b1
ttcgtttcttccaaccaactcctccacccctgtcccaatcccaaaacctcgcgggctcattgcagcacacctgcgctgcgcgagatgttccccgcaggcgaccacctcctccttttcgcgctcgcttccctcgggggcgcagcggcggccggcgccggcgaggggttctgctcggcggaaccgtcaaacgattgttctcagtcgccgccgctctactcgaaggtcaccagtcccactctcgcacccgtgcatttgcaagatttacctggcttcacacgtagtgtgtacaaaaaggatcatgctttaataacaccagaaagccatgtattcagtcctttgcctgattggaccaacacgttaggagcatatttgat

SEQ ID NO: 9026 - DNA, 228 bp, Triticum aestivum
  Clone ID: uC-tsrow189055d05b1
gtactgtgcatatgttggtgaccagggcgtgtctggtctcatctgttccgcgacagcctcgcttgccaaggtctgccttcagggtttgagcatcactgatgcttctcttgctgtgattgggtactatggaaaggcgatcacaaacctcaccctcactcgcctgtccgcggttggcgagaggggtttttgggtgatggcacatgcccttggcctgcataagctcatatg

SEQ ID NO: 9027 - DNA, 372 bp, Triticum aestivum
  unsure (1)..(372): unsure at all n locations
  Clone ID: uC-tsrow189055d06b1
tcgtgttcgcccacggtctaatccgattcaaacgcaccgcttcctcgtgtccgaactaagccccaatcccgtcaccaccgccgctggtgctcggcgcgatggcgcagaaggacgccgccaatggcaacggcgccaccacgcgcccgtcgcccactccctcccccatccgcttctccaagttcttccaggccaacatgcggatcctggtcaccggcggagctggcttcatcggctcgcacctcgtcgacaagctcatggagaacgagaagaacgaggtcattgttgctgacaactttttcactgggtcaaaagacaacctgaagaagtgggatcggacaccntagatttgaactcatccgcaacgatgtcacc

SEQ ID NO: 9028 - DNA, 348 bp, Triticum aestivum
  Clone ID: uC-tsrow189055d07b1
tgttcgcttcataggtggaaagcaaactttatcactaaagctatggccaaccaaactgccttagttactgatagagcaaggttatcagcttttaaccaagtctcctcattgggactgattgcacttggtataatgggtcttgctgaggcttgtggtgtagctgttcaatcaatattaactgttggtggtgtgggcaggtgttgctacggcttttgctgcttgagatgtctcgggcatcgtgttgaatgggttctccttacaattttctaggccattctgagctggagaatacataaaggctgggtcaatagaaggcatggcactcgatataggacttacttcaacttt

SEQ ID NO: 9029 - DNA, 160 bp, Triticum aestivum
  Clone ID: uC-tsrow189055d08b1
gtccgccgcgaggccgcctccggcctcgacatccgcttccaccgcctccccgccgtcgaccccccggccgacgccgtcggggtcgaggacttcatcgcgcgctacatccagctccacgcgccccacgtccgggacgccgtcgccgggatgccctgccctg

SEQ ID NO: 9030 - DNA, 300 bp, Triticum aestivum
  Clone ID: uC-tsrow189055d09b1
tgttcgggagggagagttctctgaggcccgtgaggatcttgctgccctggagaaggactacgaagaagttggtgctgagttcgacgagggtgaggacggtgacgagggcgatgagtactagagcctgcctcctggtgctttcccaaggcatgctgctgcaatcctatgatctgcccgagtggctttatctgttatctgtctgtttgaacatttgctttgtggtgtattgttttacaacctgttgtgttgtaagaaccttgtatgtttgaacctgttatgcaccttggttaatatgcatag

SEQ ID NO: 9031 - DNA, 325 bp, Triticum aestivum
  Clone ID: uC-tsrow189055d10b1
tcgctggatttactccctccgttccagaatataaggtgtattggtttccgtgcaagtcaaacttgcacttgtttgacttttcaaaaaacaaatacaccttatataaaggaacggagggagtattatttatcaatgaacgaatctatctagctgtgccgtcagacattttatccgcggatgatcgacgcaaatcggcagcaaggacagtttttgttttctggcctatgaaagctatgtctctaaaggaaggatcactaaagtggttttttcattaacccacacataggtgcactacttgaaagtcatgcaccctgagataaacatg

SEQ ID NO: 9032 - DNA, 353 bp, Triticum aestivum
  Clone ID: uC-tsrow189055d11b1
tcgtcgcccacgcgtccgctctcccctgctccctcccctgctcccccactggttttgtgtcctgagccatggctgccaagctgactcgcctccacagcctcagggagcgcctgggtgccaccttctcctcccaccccaatgagctcattgcactcttctccaggtatgttcaccagggcaaaggcatgctccagcgccaccagctgcttgctgagtttgacgaactgttcgaatccgacaaggagaagtatgcgccctttgaagacatcctccgagctgctcaggaagcaattgtgctgcccccatgggttgcacttgccatcaggcccaggcctggtgtctgggactacatt

SEQ ID NO: 9033 - DNA, 212 bp, Triticum aestivum
  Clone ID: uC-tsrow189055e01b1
tcgttcaaagctacttcatgtaagcctcctcctctccacctacaaagcaggagctcagtctcaggtgctgggatagctctgctagttcgtcgactttggaaatggccaccaactcgaggtcgaactccagggccaccttctccagcgagatccacgacatcggcacggtgcagaactccaccacgcccagcatggtgtactacaccgagcgg

SEQ ID NO: 9034 - DNA, 105 bp, Triticum aestivum
  Clone ID: uC-tsrow189055e02b1
ttcacgcgtccgccctccccacctactccctcgccgcgccgccgcgcagccgcgagtgcagcgaacatcggcgccagtgccacgcttatggccgccacctcccat

SEQ ID NO: 9035 - DNA, 245 bp, Triticum aestivum
  Clone ID: uC-tsrow189055e03b1
ttccctgctgctcctaaagttcccaagtcaagcgcagcacaggaacctaccgtcataccagcagtcaacaaccttgccaacccaaatgctttcgtctacccgcctgctgactttgcatcaaagcagccacttgttcagcctgacaacgtgccatatgttcccgcaattaactctgctgcccctgttgaagctcctgttatgaatatgtactctgaccagggaagcaactcctttggctgctctga

SEQ ID NO: 9036 - DNA, 385 bp, Triticum aestivum
  Clone ID: uC-tsrow189055e05b1
tcgctttgccctcctccaaccgccacctccctcccccgacctcgtcgcgcgatctccgaccgcccgccgagccccagcgggaggagcttcgagcccgcgcccccggcgtcccatggtgggtacggcacatcggggccgcgagatctagggttttcgcgccgcggcgggagcgatggggcgccggaaggccacggcggggccggctcggggctcctcgagggccgaccacggtgtaatcttcgaaatccgggggaaacatagattggaattggagaatttgacactaacaaagcacccattcaggacattgcacttctgtaatttagctatgttgcaatacttgaaaagatcagcagcatatatcctgagtaaaagagctttgttt

SEQ ID NO: 9037 - DNA, 400 bp, Triticum aestivum
  unsure (1)..(400): unsure at all n locations
  Clone ID: uC-tsrow189055e06b1
tcgttctcctcctgccaccgatcccgaaccagggaggaacccggcgcgaggagggcaaaggaagagaagaggagatcaccgagcccagcgcgcgcacaggacagcaggcgccgcgatctcgcgcaggagcggagatggggctcacgttcacgaagctgttcagccggctcttcgccaagaaggagatgaggatcctctacaagctcaagctncgagagatcgtcaccaccatccccacaatcgggtttaatgtcgaaactgtagagtacaagaacattagtttcaccgtttgggatgtcgggggtcaggacaagatcaggcccctgtggaggcactacttccagaacacccagggtctcatttttgtcgtggacagcaatgacagagagcgtgttgttga

SEQ ID NO: 9038 - DNA, 266 bp, Triticum aestivum
  Clone ID: uC-tsrow189055e07b1
tcgctcaaggagatcatcaagtacaagggcttccaggtggcgccggcggagctcgaggccctcctcatcacgcacccggagatcaaggacgccgccgtcgtatcactgaaggacgatcttgctggcgaagtcccggtcgccttcgttatgcggatcgaaggctccgaaatcaccgaggatgacatcaagaaattcgtcgcaaaggaggttgttctctacaagaggatccacaaggtcttcttcactgactccattcccaagaaccc

SEQ ID NO: 9039 - DNA, 454 bp, Triticum aestivum
  Clone ID: uC-tsrow189055e08b1
tttcccacgcgtccgttccgatcaaacgcggcggcagcagcagcagcggcagcgcaagtagagcaattggaattttcgccgacacatctcttcaattgatcgtaatcagaggtagattggagtatcaccaccaccactcaagaaatggcggccgagactttcctcttcacctctgagtctgtgaacgagggccaccctgacaagctctgcgaccaggtctctgacgctgtgcttgacgcgtgcctcgcccaagacgctgacagcaaggttgcctgtgagacatgcaccaagaccaacatggtcatggtttttggctgagatcaccaccaaggccactgttgactatgagaagattgtgcgtgacacctgccgcaacattggcttcatctctgatgatgttggccttgatgctgaccggtgcaaggtgcttgtcaacatagagcagcagtctcct

SEQ ID NO: 9040 - DNA, 351 bp, Triticum aestivum
  Clone ID: uC-tsrow189055e10b1
tcgctcgtccaccgcctccgccttctgagaagcgccgtcgtctccccttcttcggcgctgctgccgtgcagccgcccgcgcctcgctatccccttcgcgcagccgccgctccgcgccgccgccttcgccggcgcctcgtcgccgctgctccgcccggtcggcgccagattctcgctgttcagcagcatggccgccgccgcctcctccgcctcctccgtccacgacttcaccgtcaaggatgcaagtggaaaagatgtcgacctgagcacctacaaggggaaggctctcctcattgtcaatgttgcatcccagtgtggcttgaccaattccaactacacggagctcgctcag

SEQ ID NO: 9041 - DNA, 390 bp, Triticum aestivum
  Clone ID: uC-tsrow189055e11b1
tcgctagaagctttggctgctgagctctatgcattgtcccggtatatgtcttctggaagactgccgggaaatccagagtgtaatgggcttattgaagacaaagagactgaaaataataaagagagctcaaaaactgacgagtctgagctcagattggcacagcttcaacatcagctacctgctaatgaacctggtgcgttaatgcatcttgtagaagaatcaactgctgatgatacagaagaggaaagcgttaaagagtgcaggactttattcaaagatctgaagttctacttaagtcgtgaggttcccagggagtctctcttgtttataattccggcatttggaggaactgtttcgtgggaaggagaaggagctccatttgatgaaaca

SEQ ID NO: 9042 - DNA, 137 bp, Triticum aestivum
  Clone ID: uC-tsrow189055e12b1
tcgcccacgcgtccgaacacccctgagatgccacccgtgtccacccagataatcgcgagagatatttcgtcccggacgcgtccggcccgacgaccgaccgacgaacagcgtatatgtaggagggagaggatgagcac

SEQ ID NO: 9043 - DNA, 198 bp, Triticum aestivum
  Clone ID: uC-tsrow189055f01b1
tcgtagcctttaagttgaactgggcatcctatagcatgggtgaaaagcgatcagaagttgtctctgaccactcaatttttgttggtgatttagctgctgatgttactgatgaaatgttgatggagctttttgcttgcaagtatcgctccctgaaaggagctaaagttatcattgatgcaaacacaggccgttctaggg

SEQ ID NO: 9044 - DNA, 202 bp, Triticum aestivum
  Clone ID: uC-tsrow189055f02b1
gtcgcgtggtgggaagacgagaaccttccaaaggccaaagcccataacccctaacctagggtttcgccgccatgggatccgacgcctacggcggctacgacgcagtgccgccaccgtcttctgcagcgcaaccacacggggccgcgccgtcgtatggggttgggctcgccggcatcctccctcagaagccggatggggatga

SEQ ID NO: 9045 - DNA, 201 bp, Triticum aestivum
  Clone ID: uC-tsrow189055f03b1
tcgtcacgcgttcgcccacgcgtccgggaacactgtatactcagcagtcctacaaagtaagtgatacctttcccttcaagtggataaacaagaaatggcgtgatggtttctatgtgacttccatggcaactgctggaaataaatgggcgattgttatgtcccgcaatgcagggttttcggaacaggtatcatcatttgcac

SEQ ID NO: 9046 - DNA, 365 bp, Triticum aestivum
  Clone ID: uC-tsrow189055f04b1
ttgcttactacctccctcgcctgcgacccatcacacatacacagcgcgagcgtcttaaccgggcctgcgcgaagagaagagtgcagaggagcgcacagattaagcaacagcaatggtgagggctccttgctgcgagaagttggggctcaagagaggcccgtggacggcgaaggaggacatgaccctggtggctcacatcgagaagcacgggcacagcaactggcgggcgctgccgaagcaggccggcctgctgcgctgcggcaagagctgccgcctccgatggatcaactacctgcgccccgacatcaagcgcggcaacttcaccagcgaggaggaagaagccatcatccaactccacgccatgc

SEQ ID NO: 9047 - DNA, 129 bp, Triticum aestivum
  Clone ID: uC-tsrow189055f05b1
gcgtccgcacctttgttcgcccttctcctctccctcgtgacaccactcccagagaaagagagagacagatggcgatgcgggcggtggcggtgctgctgcttctggcggtgggcagcgtgctggcggggg

SEQ ID NO: 9048 - DNA, 392 bp, Triticum aestivum
  Clone ID: uC-tsrow189055f06b1
tcggtcggagcaacctggaacagggttgttggatctgagccagtgaaggagtggccgactgcctctgcgacctcccgccgccagccgcaggcagatgctgccgaccggcaggggcaggcctcagcccaggcctgcgcccagatcttggtccttctcagacatggacttctctgatccgaagcgcaactccagatacctcagcaagatcatcatggtcgcgctcctcacggccatgtgcgtcgtcatgctcacccagccgccctgccacaggaaggctcccagtgtgttctccatccatgaactcggagtaacacatgtgtctggtgacgggtggcgctggctacataggatcgcatgcggctcttcgactgctcaaggactccttcagagtc

SEQ ID NO: 9049 - DNA, 399 bp, Triticum aestivum
  Clone ID: uC-tsrow189055f07b1
tgcgggcccaagttcctgaacgccagcgtggggttcggcgggtcgtgcttccagaaggacatcctgaacctggtgtacatctgcgagtgcaacggcctgccggaggtggccaactactggaagcaggtgatcaagatcaacgactaccagaagagccggttcgtgaaccgcgtggtgtcgtccatgttcaacacggtgtccggcaagaagatcgccgtgctcgggttcgccttcaagaaggacacgggcgacacccgggagacgccggcgatcgacgtgtgcaagggcctggtgggcgacaaggcccaggtgagcatctacgacccgcaggtgacggaggatcagatccagcgggacctggccatgaacaagttcgactgggaccacccgttgcacctg

SEQ ID NO: 9050 - DNA, 241 bp, Triticum aestivum
  Clone ID: uC-tsrow189055f08b1
cgcccgctgaggtttccgccgcgatctcgtctcgatccgcactctctatctgagatttggaatcgggtgaagcctgcagctcctgccgacatggcgctcgttttgcattcaggcagcggcaacaagaatgccttcaaggcacttattgctgcagagtactgtggggtcaaggttgagctccccaagaacttcgagatgggtgtatcaaacaaaacccctgaattcatcaagatgaaccccc

SEQ ID NO: 9051 - DNA, 414 bp, Triticum aestivum
  unsure (1)..(414): unsure at all n locations
  Clone ID: uC-tsrow189055f09b1
tgtctgatcaacccggcggtgacgttcgggctgttcctggcgaggaaggtgtcgctcatccgggcgctgctctacatcattgcgcagtgcctcggcgccatctgcggcgtcgggcttgtcaagggcttccagagctcctactacgtgcggaacggcggtggcgccaacgagctcagcgcaggctactccaagggcaccgggctcgcggccgagatcatcggcaccttcgtgctcgtctacaccgtcttctccgacaccgaccccaagcgcaacgcccgtgactcccacatcccggtgctggctcctctcccaatcggattcgccgtgttcatggtccacctggccaccatccccatcaccggcaccggcatcaacccagcgagaagcttgngagctgctgtcatctacaacact

SEQ ID NO: 9052 - DNA, 291 bp, Triticum aestivum
  Clone ID: uC-tsrow189055f10b1
ttgccacgcgtccgaccacgatttcaacatttttttcaggagggggagatgagattcgtacatagacagcttgtttgtacttggcaatggagtggagatgtttggttcagctttttatgcttgaatttgggtacacttgtttttaagatcaatagcccctagatcatagtactagactactaatgcttgtgcaagttttccttaattaattgtgagacgtgctccttcagattgaagatggtcatgaccaatttgagtcgtgcaaaaccattcaacattgttggttgaatt

SEQ ID NO: 9053 - DNA, 130 bp, Triticum aestivum
  Clone ID: uC-tsrow189055f11b1
aacaaagtgcgcgtgagaaatcaacaagcggtgcttgccgagaagagagagagagatggcggcgtcggcggcgacggcaacggcggcggcggcggcgacggcaacggcggcggcggtgggggcgggggag

SEQ ID NO: 9054 - DNA, 234 bp, Triticum aestivum
  Clone ID: uC-tsrow189055g01b1
ttgtggcctcccctgcattccatctcgaacccattaaacaaccggagccgtcctcctcctcctcccaccagatctcagatccgcggagctccagtgcgcctcccatggcggtcaaggtctacgtcgtgtactactccatgtatggtcatgttgctaagctagctgatgagatcaagaaaggtgcttcctctgtcgaaggcgtggaggttaaagtgtggcaggtccctgagatcc

SEQ ID NO: 9055 - DNA, 113 bp, Triticum aestivum
  Clone ID: uC-tsrow189055g02b1
tgtgcgctgccgccgcacagagagagcgcgcgcgccatggctcctccgcctcgtcgccgtcggcacctcctcctgcccgcgctcctcctcgccgtctccgcgctgtggggagc

SEQ ID NO: 9056 - DNA, 213 bp, Triticum aestivum
  Clone ID: uC-tsrow189055g04b1
gcgtccgctaatttctttcctaccagaaaaaaaacacagtctcgatctgcatcggcgccattccggcgacgccatgcgcgccgatgaggagcgcgatgccgtgtgcgtgccgtacccggcgcaggggcacgccaccccgatgatgaagctggccaaggtcctccactccaggggcttccacgtcaccttcgtctacaccgagcacaaccaccg

SEQ ID NO: 9057 - DNA, 254 bp, Triticum aestivum
  Clone ID: uC-tsrow189055g06b1
gcgtccgctttcctctcgccagtcgcaacctggtggtgccgccgctgacatcgtctgcctccgcccccgcaccacgatggaccccacctcacgccccgccgtcgtcattgacaacggcaccggctacaccaagatgggattcgccgggaacgtggagccctgcttcatcacccccaccgccgtcgccgtcaacgagtccttctccgaccagacgagggccaccgccaaagggaactggctggcgcagcacagcg

SEQ ID NO: 9058 - DNA, 172 bp, Triticum aestivum
  Clone ID: uC-tsrow189055g07b1
ctcgcggacgcgtggggttgccaaattctgtgcaaaatatctacacagggaagttctcaaaagtgaagtttatttagctggtgacctgggagctgctgcccatggagctttcttcagaatggatgagatgatgcggggtcaaagaggctggcgagaactacaggcactcgga

SEQ ID NO: 9059 - DNA, 212 bp, Triticum aestivum
  Clone ID: uC-tsrow189055g08b1
tgtcggttcatttcttgcagttgtcatctttaacatgttagagcctggtaacatgtccagagctatttgtggcgaccaagtaggtacgttagttgaccagtcaggaaggataacttaaatcacaagggcgattagctgtgttgtagcattgggacatttgtattctctcacggcagtgtgcatcttcgttgattgcatggatctttgtggat

SEQ ID NO: 9060 - DNA, 132 bp, Triticum aestivum
  Clone ID: uC-tsrow189055g09b1
ttgcccacgcgtgcggagcaggcaactcacatccatgggtgttgatcctactgctggtgggaaccgacttcgcagccagtgaagaggccgtaagcgtgagaggacactgagcagagctgatggtgatgatgc

SEQ ID NO: 9061 - DNA, 158 bp, Triticum aestivum
  Clone ID: uC-tsrow189055g11b1
cccgctctcctccacccctaccatgggcggccccagctcctgggccttcccgttccacgaaaagagagcttagcgctgccgagccctccgtcctctccacttcccggctgctttctccgtccgtccggtcgtcaatcttcgtcgagcagagagaggga

SEQ ID NO: 9062 - DNA, 203 bp, Triticum aestivum
  Clone ID: uC-tsrow189055g12b1
ttgttcttttctgccccggacagcagcactgcctaggtgtcgtgcaaaccaaaccaaaccaaaatctgctgaggtgtcctctactcgagcaagtgtgccaatcctaggctcgctcgcctgatcaatccttcgcgtcgccagcttcatctcgaggcgaggaggcggacgatttgaacccatggatatggcgcacgagagggact

SEQ ID NO: 9063 - DNA, 367 bp, Triticum aestivum
  Clone ID: uC-tsrow189055h02b1
ttcacgcgtccggccacgcgtccgtcctagccgcctgcagcacgctgctcctccgcctcgagcagctgatggacgcgcgcagacatggcgacggagaccgagaccttcgccttccaggccgagatcaaccagctcctctcgctcatcatcaacaccttctactccaacaaggagatcttcctccgcgagctcatctccaactcctccgatgccttggacaagatcaggttcgagagcctcacggacaagagcaagctcgatgcgcagcccgagctcttcatccacatcatccccgacaaggcgaccagcacgctcacgatcgtcgacagcggcattggcatgaccaagtcggacctcgtcaacaacc

SEQ ID NO: 9064 - DNA, 287 bp, Triticum aestivum
  Clone ID: uC-tsrow189055h03b1
tgttcttctctcgggacacttcccaacctagtctacctggatctaggcgttaatcgtctcgaggcaggaggttggtctttcttaacctcattgaccaactgcacccaactggtggaattattcttggatgcaaacatccttcagggagatttgcctagttccattgcaggcctttcaaagagcttagaggtattgttattaacagcaaataaaatatcaggcactataccacaggagatagagcagctcacaaacatcaaacgtctttacatggaaaaaaatctgct

SEQ ID NO: 9065 - DNA, 158 bp, Triticum aestivum
  Clone ID: uC-tsrow189055h05b1
ggtggtaaccctagcttcgtataaacccaaaccccccgcctggcctggccggagcggcggcagcagtcgccggcagcgatggacgcgatgcggaagcagctggacgtgctgatgggggccaaccgcaacggcgacgtgcgggaggtcaaccgcaagta

SEQ ID NO: 9066 - DNA, 98 bp, Triticum aestivum
  Clone ID: uC-tsrow189055h10b1
gtcttaagacttacgatcctggatatctcaacactgacgctgtgcgttcttacatctgctacattgatggggatgagggaattcttcgctacaggggt

SEQ ID NO: 9067 - DNA, 484 bp, Triticum aestivum
  Clone ID: uC-tsrow189057a01b1
ttgttcacgcgtccgcccacgcgtccgggaattcggcattgctggattaaagagggcccttgaagcattgaacacacacctggcatcaaacacattccttgttgggcattctgtcactctggctgatattgtcatgacatgcaacctctaccatggttttgctcggatcttgaccaagactttcacatctgagttccctcatgttgagaggtacttctggaccatggttaaccagcctaacttcaagaaggtcattggcgaattcaagcaggcagaggttgtacctcctgttcagaagaaggctgctcctgctaaacaaaaggaggccaagaaagaggctcccaaggcggccccaaagccagcagtagttgaggcaccagaggaagaggcaccaaagcctaagcccaaaaatccccttgatctactgccaccaagcaagatggtacttgatgactggaagaggctatactcaaacactaagagc

SEQ ID NO: 9068 - DNA, 397 bp, Triticum aestivum
  Clone ID: uC-tsrow189057a02b1
ttgtcacgcgtccgcgccatgatcgccctcgtgggcctgctccggtacgccaagtgcgtcctgttcagtgccacgccccggccttcagattccaaggcggacgtcgatgtcgaagacgacggggagtccccggcgcccccaccggacctccggtgccccatctccctcgatctaatgcgcgacccagtcgtcgccgctagcggtcagacctacgaccgcgagtcgatcgaccggtggttcagctccggcaagtcaacgtgccccaagacggggcaagtcttggccaatctggagctggtgcccaacaagtctctcaagaacctcatctccaagtggtgccgggagaacggcgtggccatggaagtctgcgaggccagcaagagcgagcaggcccagg

SEQ ID NO: 9069 - DNA, 111 bp, Triticum aestivum
  Clone ID: uC-tsrow189057a05b1
tgcttacgcgtccggtcatggcatcttccaagagtagtcttgcaatgttcgcactggccatagtcatggccgtggtggctgacgtctcggcacagaacaccccgcaggact

SEQ ID NO: 9070 - DNA, 228 bp, Triticum aestivum
  Clone ID: uC-tsrow189057a06b1
ttgtagtactagctagcactgagcaatggcttccaatgcgagcttgttggcggcgatcatggcgtgcacactcctcggaggccacacgtgccacggcgcacgccacttggccgacaccaccccggcggctgccccacccgttgcggctgctgtccctggcctcccggccctgcctaccatgccgaccctgccaccgatgccggctgtgccaacggttccggccgtgac

SEQ ID NO: 9071 - DNA, 356 bp, Triticum aestivum
  Clone ID: uC-tsrow189057a07b1
gctccgtcgcttgggcgcgtaacgcgatggccgtagtcacaccccactcgccgccgccgcagctttcatcgcccttcctggagtatattacggcccccggcggcctcgacaaggtcgtgctccgtggcaggcgcagctgctccgtggagatccgtctttttggaggtcaagtaacttcatggaagaatgaccatggcgaggagttgctttttgtcagcagcaaggccatcaagcctccaaaacctgttcgtggcgggatacctatttgctttccccagtttggaactcagggaaatcttgagcaacatggatttgcaagaaatcggctttgggctattgatgataatccaccccct

SEQ ID NO: 9072 - DNA, 471 bp, Triticum aestivum
  Clone ID: uC-tsrow189057a09b1
cccacgcgtccggccgccgccagcagctgcgcaaaggctcctcaaaccctaaccctagtcctagcttagcttccttcttctcgatctagctagagccatggcgccgaccaagggcgaggggccggccatcggcatcgacctcggcaccacctactcgtgcgtcggcgtgtggcagcacgaccgcgtcgagatcatcgccaacgaccagggcaaccgcaccacgccctcgtacgtcgccttcaccgactcggagcgtctcatcggcgatgccgccaagaaccaggtcgccatgaaccccatcaacaccgtcttcgatgcgaagcgtcttatcggcagaaggtttgctgatgcccctgtccagagtgacattaagatgtggccgtacaaggttattcctggccctgcagacaagcctatgattgtagtgcagtacaagggtgaggacaagcagttttcagctgaagaaatttc

SEQ ID NO: 9073 - DNA, 143 bp, Triticum aestivum
  Clone ID: uC-tsrow189057a10b1
ttctgcccacgcgtccgcggacgcgtggcggacgcgtgggttcatcctcatcttcttcgcgacggcggcgccgatcgtgaaccagaagtacggcggcgtgatctcgccgttcgggaacgcggggtgcgcgggcctggcggtga

SEQ ID NO: 9074 - DNA, 382 bp, Triticum aestivum
  Clone ID: uC-tsrow189057a11b1
gcacaattcctccctcaatcctcccgagtcaaccatgccgccgccgagcctctccgatggcccggcctcacgcgacaacgcgctcgcctccatccacaagccgccggcgtctcatggtgattcgtccactcgtcagccatcaataagaagagataatccagagaatttaaccaaagtgttggctgaggcagtgaagtgtgcacaagctcttaagactgatgatctgattactgacactagagttaaggaagcttttgcagagctgatgaacaaagtgtacccgcatctacctgagagtctacaggatcaactgattgctgatttcaaactcaatatcctccgtcgggcacaagagaaaaatactcccccagttgagttgatg

SEQ ID NO: 9075 - DNA, 495 bp, Triticum aestivum
  Clone ID: uC-tsrow189057b01b1
ttggtcgccccctcctcgcgttcctcgtgcgtgcgcagaaccccgaggcctcggcagccatggccaccggcggcgaccacgcggcggaggagctcgtgtccgtcgagatgcccgcgcccgagggatggaccaagaagtttactccccagagcaggggaagatctgagattgtttttgtttcaccaactggagaggaaattaagaacaagaggcagctgaacagctatctgaaggcaaaccctggaggccccacttcatcggagtttgactggtcaactggtgataccccaaggcgttctgctcggattagcgagaaagtgaaggtatttgatagccctcagggtgaaaagataccaaagcgcagtaggaactcaagtggcaggaaggggaagcaagagaaaaaggaggatcctgaaactgaagaagacaaagaagctgaagcgggcaaggaggcccctagtgaagatgctgcaaagagcactgatgtggagatga

SEQ ID NO: 9076 - DNA, 435 bp, Triticum aestivum
  Clone ID: uC-tsrow189057b02b1
ttgtttacgcgtggggtcttctgcttatgtccgttggggtgggcgccatggagtcctaggttggtggaggctgtggtttttggctgcattccagtcatcatagctgacgacatcgtgctgcctttcgcggatgcaatcccttgggacgaaattggtgtttttgttgatgaggaggatgtgccaaagcttgattcaattctgacatcgattccgattgatgatatcctaaggaagcaaagattgctcgccaacccatcaatgaagaaggccatgctgttcccgcagccagcgcaacctagagatgcattccatcagattctaaatggccttgctcgcaaactcccgcacccagagaccatatacttacaaccaggtgagaagcatctcaactggacagctgggcctgttggagacttgaagccttggtaacataaa

SEQ ID NO: 9077 - DNA, 139 bp, Triticum aestivum
  Clone ID: uC-tsrow189057b03b1
ttctcgcgtccgcggacgcgtggggaaaaatctctttgactcctcccatttcctatcactccggcgtgcgagcggtagccatggtgattgcttcagtcgcgacctactcctcgtccctagcgccaccgccggcgaggag

SEQ ID NO: 9078 - DNA, 354 bp, Triticum aestivum
  Clone ID: uC-tsrow189057b04b1
ttgtttccaagtttccaacttccaacagaacaaagatggcgagcagacagtttccggcaatgctgctgctcaccgcggtgacaatggccggactggccgccggagcgcgcgcgggcggcatcgcgatctactggggccagaacggcaacgagggcacgctggcgcaggcgtgcgcgacgggaaactacaagttcgtcaacgtggccttcctcttcaccttcggcaagggccagaagccgctgctgaacctggccgggcactgcgacccggcgaccagcggctcgtgcaccttcgtgggcgccgacgtcaagtcctgccagagccgcggcatcaaggtcctgctctccatcggcg

SEQ ID NO: 9079 - DNA, 407 bp, Triticum aestivum
  Clone ID: uC-tsrow189057b06b1
tcgtttagagtcaatcaaaagtcttagtgccacttcttgctgctactacattcatgatgaccattgtgtgactacatttgctgtcgtcaagcctttcaagtatctgctctcctgatgtttacacaagggagatgctactaaggaagcagaacatggagaagttttcctgatgtttacacaagggagatgctactaaggaagcagaacacggagaagttttcctgatgtttacacaagggagatgatactaaagaagtagaacacgaagaagtttcaatgaattagagagttatagatgccagctggtcctctacatacctgataaaaataagaaaaatatatgtcaatgtaatctgcatccattgcagctaatagctctcagttttgccaatggcaatgggctgctg

SEQ ID NO: 9080 - DNA, 304 bp, Triticum aestivum
  Clone ID: uC-tsrow189057b07b1
tcgtcgtggacgcgtgggttcgaagcccaccgaattcctcgcgattcctctcccctcgcctcctcgtcctcccccttctaggggatcgccggagaggaatcgcgacgagggcttcctcctatcagttaaatcaaagtcatggagcacaaggagaccggctgccagtctcgtgagggccccatcctttgcgtcaataactgcggcttcttcggcagtgcggcgaccatgaacatgtgctccaagtgccacatggagatggcgatgaagcaggagcaggccaagctggccgtctgctcttttgaca

SEQ ID NO: 9081 - DNA, 417 bp, Triticum aestivum
  Clone ID: uC-tsrow189057b09b1
ttttgcccacgcgtccgcccacgcgtccggagggattgaatcagctatctcctcgtctgagactacgggcaacctgtgatgattttatagagggaaaagttggtaccctggatgggttatatggcaccggagctaagttaccctcagaggagtttatcagcagtaagttgacaccaaagcttgctcggcaaattcaggatgttcttgcactctgcagtggtagtttaccttcttggtgttatcagatgaccaaagcttgtccatttctgtttccttttgaaacaagaagacaacacttctactccacagcttttgggttatctagggcattgaatcgtcttcagcaacaacagggtgataataatagctcagcgactgaaagagaagtccggattggtagattgcaacgccagaaag

SEQ ID NO: 9082 - DNA, 432 bp, Triticum aestivum
  Clone ID: uC-tsrow189057b10b1
ttgttctcaacaactggctatcttggagctgggtatcaagaagctatggaatcgtcattctcacccattactccaagtgaaacacaaagtccagctcatggaaatcggcaacaaccatatatggaatctccagttgccttgagaccacattttccagctgataggaaatgggctcttgggcttcagtctcgagcacatccaagagaagttatgactgaagtgctgaaggctctgcaagaactgaatgtatactggaaaaaaattggacactataacatgaaatgtagatggagtccttctggctttcccggtcaggagaatatgaatcataccaattataacttcagtgcagagcctattgaaaccgacgacctgggtgacatgttaaatttaattaagttcgaacttcagctttacaaaacaagagatgag

SEQ ID NO: 9083 - DNA, 228 bp, Triticum aestivum
  Clone ID: uC-tsrow189057b11b1
tgggccctgttccagtcgcaggcgccctgcctttgcgccgccgtgtccgccgtgcccgcccagctcgggtccgtggtcggtggccggctccccaccgcgtgcaacctgccccccaacgcctgctctgccgtgacagggacctcgggctctgctccggccggtggcgcagcggcgccgtcgtcgtcggggacgcctactgatgctgctgcggctgcgccggcgaccggt

SEQ ID NO: 9084 - DNA, 327 bp, Triticum aestivum
  Clone ID: uC-tsrow189057b12b1
tgctccggggccctgttccagtcgcaggcgccctgcctctgcgccgccgtgtccgccgtgcccgcccagctcgggtccgtggtcggcggccggctccccaccgcgtgcaacctgccccccaacgcctgctctgccgtgacagggacctcgggctctgctccggccggtggcgcagcggcgccgtcgtcgtcggggacgcctactgatgctgctgcggctgcgccggcgaccggtcccgctgatgcgaacccggctggcacgccttccggtggtggggtgaagtcggttccggggacggttgattcggccgccgagtgcaaggggacc

SEQ ID NO: 9085 - DNA, 456 bp, Triticum aestivum
  Clone ID: uC-tsrow189057c01b1
tgcaactgggacgggtagcaatactgttcgctatactgcttggatgagctttgatgattttgaggtggaagtgccaattgtacctcagtcatcatataaaggtgctaaaaaggatattataaagaaatatcgtgttaatgcaatcagatcgaacttggactcggaggtcaatgagggcaagggtcctgtctctagtgtcctctctaatatttcctcgattgcttcttcgctctattctatccctatgttggcacctgttgctggcccgacagcctggatgaccaacttagcttctggcgttgcgtccgcctttggttggtgcaagccagtgttggactcccaagttatccgtgtctatcaacagcctcatgcttataatgctaacataaacgaatctgacgttactaatagtcttggcttgtttgtgacaataaggtttgcgttatgcctgatgtt

SEQ ID NO: 9086 - DNA, 395 bp, Triticum aestivum
  Clone ID: uC-tsrow189057c02b1
ttgttcaggtgctgtgatagctctgctagttggtcgactttggaaatggccaccaactcgaggtcgaactccagggcgaccttctccagcgagatccacgacatcggcacggtgcagaactccgccacgcccagcatggtgtactacaccgagcggtccatcgccgactacttccctccccacctcctcaagaaggtggtgtcggaggtggtgtccacgttcctgctggtgttcgtgacgtgcggggcggcggcgatcagcgcccacgacgtcacgcgcatatcgcagctcggccagtcggtcgccggcgggctcatcgtcgtcgtcatgatctacgccgtcggccacatctccggcgcgcacatgaaccccgccgtcaccctcgccttcgccat

SEQ ID NO: 9087 - DNA, 396 bp, Triticum aestivum
  Clone ID: uC-tsrow189057c03b1
tcctcacgcgtccgcggacgcgtgggtggcagtgcagttactgttgcggcggagaacattgtttttcacgatgcagcagtttctgaaaaagtaacactgggttcatttgctggagactacgaccaagatgatgacaatgcggcagctttaggtgaataccttaagcgaccagtgcgcttggcgagttatgcgtgggctcaaggaggaggttttgcacagagcatcaccccttgggcggcatatttctccgacaccttcattcgaaggaagttggagaactacggcaaaattcggtgtaagttacatctgaagttcatggtaaacgcttcacccttccattatggaagtttgcgtgcgtgctatttccctatgggggatgcgcgctcgacgttcgtg

SEQ ID NO: 9088 - DNA, 395 bp, Triticum aestivum
  Clone ID: uC-tsrow189057c04b1
ttcgttacgcgtgggcggacgcgtgggcggacgcgtggggtttttcgatctgatctttcccctatcttcgccgcccaacttccccccatctcgcgcactccgtcgaacatggcggcgcgcgggcaggggcaggtgcaagatttcgacttcttcgtggtggtcgacttcgaggcgacgtgcgtgaaagacgggaggatcttcccgcaggaaatcatcaagttccccgccgtgctcgtcgacggcgccaccggccgcatcgagtcggcgtttcgcaggtacgttcgtccaaaacatcaccctgtgctgactcaattttgcagggaactcaccggcatttcggcaggaggacgtcgacagcggcgtggatctcggcgaggcgctttggctgcacgagg

SEQ ID NO: 9089 - DNA, 411 bp, Triticum aestivum
  Clone ID: uC-tsrow189057c05b1
tcgtaaaaaccccgacgcccaccccactcccagcttccctaacctccccacgactacctctttgctgtcgcccgagcctctcccaccagcgcgccgccgccgctgcccgaggcccctccgaccagcgcgccgtcgccgcccggggctccttcccaccagtgcgtcaccgccgcccctaagcccctccgaccaacgcgccgccaccgtcctgatccccctacgaccaacgcgccaccgctgccccgatccccctccgaccagcacgccgccgccggcgccaagcccctcacaccagcgcgtcgccgccgccccgatccccctcccaccagtgcaccacggccgccccaaacccccttccatgaccatatcacccgcaccatcggccgcgcctccctcctgcatgccacctgc

SEQ ID NO: 9090 - DNA, 399 bp, Triticum aestivum
  Clone ID: uC-tsrow189057c06b1
ttggtcggctcgtgcgcaacgacgccgacgccggcgcgcgcatggcgttccgcacggcggacgtggccgacgtgaccaccgagctggcggggtacgacgtggtgttcctcgcggcgctggtgggcatggcggccgaggagaaggcgcgcctggtggagcacctcgggaggcacatggcccccggcgcggcgctcgtggtgcggagcgcgcacggcgcgcgcgggttcctgtacccggtggtggaccccgaggagatccggcgaggcggattcgaggtgctcaccgtgcaccacccggaggacgaggtgatcaacttcgtcatcatcgcgcgcaaggcggcggcgccaccagccgttgccgtcgacggcgacgtgccggtgaacaacggcagcatgcccg

SEQ ID NO: 9091 - DNA, 375 bp, Triticum aestivum
  Clone ID: uC-tsrow189057c07b1
tgtcgcccacgcgtccgcccacgcgtccgtctcagttccccgcagccgcttcgctcgcttgccttctctcgccgtctccgcctcctcctccagtcctccgtcccacccctcgacgattcctcggcgatgggcggcgcggcggcggcgacgggcgccgccaggtggatccagcggctgagcgcggccaggatctcgacggaggcgctggagcggggccagagccgcgtcatcgacgcctccctcaccctcatccgcgagcgcgccaagctcaagggcgagctgctgcgtgctatgggcggtgtcaaagcttctgcaacactcttaggagtaccccttgggcacaactcgtctttcttgcaggggcctgcgtttgct

SEQ ID NO: 9092 - DNA, 370 bp, Triticum aestivum
  Clone ID: uC-tsrow189057c10b1
ttttcgcccacgcgtccgcggacgcgtggcggagctgcgggcgccggagatcacgctctgcgccaacagctgcggcttccccggcagttgaccgcgctccggcgacggaggcgaagccggcgaggacgtcggtgaaccggtgctccagctgccggaagcgggtggggctgacggggttccggtgccggtgcggcgacatgttctgcggtgagcatcggtactcggaccggcacgggtgcagctacgactacaaggccgccgcccgggacgccatcgccagggacaaccccgtggtgcgcgccgccaagatcgtcaggttcagaagaggaaaggaaaaagaatccagaacccctgccgaggcatagcaaag

SEQ ID NO: 9093 - DNA, 354 bp, Triticum aestivum
  Clone ID: uC-tsrow189057c11b1
tgtttgcggacgcgtgggcggacgcgtgggaaagcaagcttagaacacaaattaaagtccatagctcacgtacccgtgtaagaaactaagaactaatgcaggtacgatggtaagtagtaggaaggttgcaaagatgaagagtattagaagattggaatttggaagatggagctcatactgattgaagccacgcagctggctcctccttgtcgttgatccgattacacacataaacgtttgcagaactaatgctaggagcactaagtttgacaaggtgtaaagctatacaccccatttgagatttacagattgtatcctgaggttctgtctacaaatacgtactgatattttttt

SEQ ID NO: 9094 - DNA, 355 bp, Triticum aestivum
  Clone ID: uC-tsrow189057c12b1
tttttttcggacgcgtgggcggacgcgtgggaaagcatgcttagaacacaaattaaagtccatagctcacgtacccgtgtaagaaactaagaactaatgcaggtacgatggtaagtagtaggaaggttgcaaagatgaagagtattagaagattggaatttggaagatggagctcatactgattgaagccacgcagttggctcctccttgtcgttgatccgattacacacataaacgtttgcagaactaatgctaggagcactaagtttgacaaggtgtaaagctatacaccccatttgagatttacagattgttttctgaggttctgtcttcaaatacgttctgatattttttt

SEQ ID NO: 9095 - DNA, 467 bp, Triticum aestivum
  Clone ID: uC-tsrow189057d01b1
tcgatttatcagaattgtgcaaaagcgagaatggccttgttgccatacctgttcatggtaatgcatatggcaagggtttgccctatgctcctgaaaattggccgtctcctggagatcagtggcaatggaaagtggggaacagaattgctgcaggtgggcattgggtggacagatatcttgccccaccctcgcgttttcgtgatgctactggtaaaaagacgacattcacaagtagactgaaagttggagagtttatcaagagcaactttccagatgttgatcctagcacatttttctctatgttcatatggaagatccctgctgcagaaggcgggattcaaagaggaactcttcaagtggaacgtgttgaacctgaagatggcctggcggatcctgatggaccatgcaaggctcggaataaggcatgcaatcttgggaaagaagggtttattgaatcatcaccagca

SEQ ID NO: 9096 - DNA, 486 bp, Triticum aestivum
  Clone ID: uC-tsrow189057d02b1
ttgtctacgcgtccggtggccaggagacagtatgaggcattggctttgttgcaatggccggagcggtgacgacgacagacatgaggtggaacattccaaagctcaggggaataagatagacggcaagctaaaatcttcgaaacctgctgaccaacctcagccagatatttcccctcctacaattgatgtcccagaactgtcatttgaggacttgaaagaaaagactgacaattttggatcgagttccctgattggtgaaggttcatacggacgagtatatcatgctaccatggatgatggcaggcaagcggctattaagaaatttgatgcatctgaaaatgagcccaatgatgaattcttgaaacaggtctcacttgtatcaaggctaaaacatgaaaatcttgtggagatgctgggctactatgtggagggcaactatcgtatactggcatatgaatttgcaacaatgggttctcttcacgatgt

SEQ ID NO: 9097 - DNA, 150 bp, Triticum aestivum
  Clone ID: uC-tsrow189057d03b1
tacgacagacagacagcacgaggaaggcgagccaaccacccaccaccgccgcgaggctagcaccacgggcgagctcggccgattccgtttgcgattccgtctgcgctattgaggtttgtttgggggaaggggaggcggttcggaggtgga

SEQ ID NO: 9098 - DNA, 396 bp, Triticum aestivum
  Clone ID: uC-tsrow189057d04b1
ttgtgacgcgtgggaacggaacgaacaaaaaatccccaacctatctcgtcgcccatcaaccctaggctcgtcgaatcctcctcccccaccgcctcaagatgcagatctttgtgaagacattgacaggcaagaccatcacccttgaggtcgagtcgtctgacacaatcgacaacgtcaaggccaagatccaggacaaggagggcatccctccggaccagcagcgtctcatcttcgctggcaagcagcttgaggatggcaggacccttgctgactacaacatccagaaggagtccacccttcaccttgtcctccgccttcgcggaggcatgcagatcttcgtcaagacgttgactggcaagaccatcacccttgaggtggagtcgtctgacaccatcg

SEQ ID NO: 9099 - DNA, 412 bp, Triticum aestivum
  Clone ID: uC-tsrow189057d06b1
ttgttttcagaagtggcgttaactagctatcttgcatctctgactatagaagagagtggtatttcagaaggattagctgcaattaaagcagagcgagcagtagagagcatatctcagagaagtgcccaacttcatgggggcacagaagatgaactctcactgaaagactctctggcggccgtgagaaatgcagctcaagcagcggctcggattcagaatgccttccgtgccttttctttcaggaggagacaacacaaggacgctcgacttaaggatgaatatgggatgacacaagaagatatagatgaacttgcagctgcatcaaggttatactaccaacatcatgtttcgaaacggcagttttgtgataaagcagctgtttcaattcagaagaaatacagaggttggaaag

SEQ ID NO: 9100 - DNA, 373 bp, Triticum aestivum
  Clone ID: uC-tsrow189057d08b1
tgtcgcccaccaatcaatggattttaggtatacggaggataggagaggagagatccatttggattcagatttcagagcggcagcttcctcccttccccttcctactctctcctactccttccccttcctactccactgacgcggccttcttcttgtcttcctctccccttccccctcccgccgccgccgccttcctccgccggggctggttcagctactaaccgcggccggggggaggagaaaggccgcctcttgtccggccacctttcggctggttcagcccacgcgggagccggattgagagatggagtcggccgccggcggcgggctgggcagcatgcgagccgtgcttgccatcctccagtggtggggc

SEQ ID NO: 9101 - DNA, 182 bp, Triticum aestivum
  Clone ID: uC-tsrow189057d09b1
gtcgtggtcgagcaaggtctgatcagtgatcctgttttcttattctggttgaaccgacatgctgatgatgaaggagagggtggtgaaattatttttggaggaatggatcctaaacactacgtgggtgaacacacatatgtcccggacacccagaagggatatttggcagttttgacatgggt

SEQ ID NO: 9102 - DNA, 489 bp, Triticum aestivum
  Clone ID: uC-tsrow189057d10b1
tttttgcccacgcgtccgccacgcgtccgggccatttgcctatacaagtatctgtccactcaatcatcaggcgctcaatcatcacccaaacgattaacttattcatacaatcacccgcgaccaataatccactgatcagtttgccgcgtgtccacttgagttatctccacaattgcccacaggaccatcggcccattcactttgaccgtcattatcgcctaaactttttccggtgctgaacagcaaggtcctccatgaatccattcgcagcaaatactgccaaaacatttttcgacctcatcaagtcagagagggatctatattcgcttgaacctgatcgtgagccatcccaatctcagcttcgtttgtttgaacgaatatgtgtgctattgaatggggaacatacatcaaaatcgcgcagcactagaacacggcacgaaaaggaacaatcaagaatccagagaatgtacgaaaagcttccatccgatc

SEQ ID NO: 9103 - DNA, 297 bp, Triticum aestivum
  Clone ID: uC-tsrow189057d11b1
tgtttgcgaccttcacggtgatcaacaagtgccagtacactgtgtgggcggcggcggtgccggccggcgggggcaggaagctggacgcggggcagacgtggagcatagacgtgccggcgggcacgacgagcgggcgggtgtgggcgcgcacggggtgcagcttcgacggcgccggcaacgggcggtgccagacgggggactgcggcgggaagctgcagtgcacgcagtacgggcaggcgcccaacacgctggcggagttcgggctgaacaagtacatgggccaggacttctttgaca

SEQ ID NO: 9104 - DNA, 423 bp, Triticum aestivum
  Clone ID: uC-tsrow189057d12b1
tcgccacgcgtccgccacgcgtccgccacgcgtccgcccacgcgtccgcccacgcgtccgcctccctcttctccgtccgtcaatccccctctatctcctccccgcaccagctcttgtactactcggagcacctccacccctgaccccgactccgaccacccatccatccgcttcttgcttcttccgctgtccgggccaagaatctgagatcctgtccggcgccgccgcttgtttcttgatggccgcatagatggcaggatcaacttcattttgagcttgtcccacaaggttgcaatcaccagtatgtcagctaaggcttcagaacgtacatatagatgctcagatgattcacaaatggcgtactacaacaactcggtgcctttagcagaaaatggacggttctatatgatgcaaaatcatctg

SEQ ID NO: 9105 - DNA, 416 bp, Triticum aestivum
  Clone ID: uC-tsrow189057e02b1
gggcagcgcccgcctcccctcctagcgtccggcgccgacctcctggacctctcctccgccatgatggacctggatccccgcctctacgaggacgcatctgtcagcgataacgatgttcgcaacatagtgctatcttatcttatgcacaattgttttaaggagaccgcagagaccttcctatccagcactgggctaaagtgacctgttgattatactgtagatgtggataaacgtaaagcgatcttaaattttgtggtggaaggggatgccgtgaaggccatagaactgacagaagagttggcgcccaacttgctagagaatgacatggattcacattatgatcttataagtcttcacttcattgagctaattcgagacagaaaatgcacagaagcacttgagtttggccagaaaaa

SEQ ID NO: 9106 - DNA, 330 bp, Triticum aestivum
  Clone ID: uC-tsrow189057e03b1
tttttcacgcgtccgggcgcctcgtcaccaacttcctctacttccgcaagatggatttggatttcctgttccacatgttttttcttgcgcgctactgcaaacttctcgaggagaactcattcaggggaagaacagctgactttttctacatgctcttgtttggtgctactgtcctgactagcatcgttctgattggtgggacaataccttacatttctgagacattcgccaggattcttttcctcaacaattcattgacgtttatgatggtttatgtctggagcaagcacaatcccttcattcacatgagcttcttgggtctgttcacct

SEQ ID NO: 9107 - DNA, 201 bp, Triticum aestivum
  Clone ID: uC-tsrow189057e04b1
ttgtttcacgcgtccgcccacgcgtccgcccacgcgtccggtgaacttcacggcattggttgttgtgctatttggtgcctcagttgttgtagctgctgttgccccagctcgccttgaagagccacaggattatgctccaatcccagaaaactagtacagtatgtgtgaagtgtactacgtaaacagaaattcactaagttt

SEQ ID NO: 9108 - DNA, 422 bp, Triticum aestivum
  Clone ID: uC-tsrow189057e05b1
ttgctcacgcgtccgattttctgcaatactaagagaaaggtggattggcttactgaaaggatgcgcaccaacaactttaccgtatcagctatgcatggtgacatgcctcaaaaggaaagggatgcgattatgagtgagttcaggagtggcacgaccggtgttctgatcacaacagatgtttgggctcgagggctggatgttcagcaggtctctcttgtcattaattatgatctcccaaataatcgtgagctttacatccatcgcatcggtcgctctgggcggtttgggcgcaagggtgtggcgatcaactttgtgcgcaaggatgacatccgtatcctgagggacattgagcagtactacagcacgcagattgacgagatgccgatgaacgtggccgatctgatctgagcactggaccggag

SEQ ID NO: 9109 - DNA, 336 bp, Triticum aestivum
  Clone ID: uC-tsrow189057e06b1
ttcgtcacgcgtccgcccacgcgtccgcccacgcgtccgcccacgcgtccgtcgtcttctccctccctccctcctgtctcctcctccgcaagcaaccctcttgcgtcgttcctgctgattggctccggcgggagggaggagggggcgcagtgagatggggaacatctgcggcggcgcggggaaggccgatgtggcggcggactaccggccgtccagcccaggaacatccaactacaagacgagcggcagcgtcaccaccagcaacagcaccacggggaagctctcctcggggggcagcagcaccttcatggcctccgcgggcagcggtggcaccag

SEQ ID NO: 9110 - DNA, 394 bp, Triticum aestivum
  Clone ID: uC-tsrow189057e07b1
tttctcgatcctacatttcgggaagagcttcttaattttacacaaagggggaggattctgcagctctcgaacttcaaggatgactccagtccaattgcctgggactgttctgcgtgggttcgcacatatggtcagtttttggaggaaagattggaatgcttcaggatcctgaaatatgatgttgaggctgaacgtttatccaaacaaggccaaggtcctgaaaagggacacagtagaaccagagacctagattcccaggatctgttagagcagttgccagctttgcagcagttactgtatcggcttgttggatgtcggccagaaggagctgcaaataacaactacttggtgcaatatgctctagctttggtgctaaaagagagtttcaaaattt

SEQ ID NO: 9111 - DNA, 346 bp, Triticum aestivum
  Clone ID: uC-tsrow189057e08b1
tttctccgacgacgacgagcacacccgcaggcgcagatctgagattgagtgagtgtgtgagagagaaatcggtggagatggccgggaggctgactgcgatgggatcccgcatcatgggcggccacggcgcagccgcacgcgccgcggcctccgccctccgcaaccgcgccggcatgggcctccccgccggcaggcacatcgtccccgacaagcccctgcctgtgaacgacgagctggtgtgggacaatggcacacccttccctgagccctgcgtcgaccgcctggcgccgcacatcggcaagtacgaggctctggcgtggctgtgtggaggtctgagcttcttcgc

SEQ ID NO: 9112 - DNA, 371 bp, Triticum aestivum
  Clone ID: uC-tsrow189057e10b1
tgtgtttgggttttttgacgccctcgccggcccgccgccacctcctcccttttcacaagcgctgcccctccactaccaccgtagcaccaggatgacggcgcagactgccgaggagctcgccgcgcatatcgagcaggagcagctcgaggcgaagaaaactgaggcagaagaggacgtggttgaggatgatgatgatgatgacgacgacgatgaggatgatgatgacaacgatgatttggatgggcaagaaggtgatgccagtggcacatcaaagcaaagcaggagtgagaagaagagtcgcaaggcaatgctgaagcttggcatgaaatccatcactggcgtaagccgtgtcactgtgaagaaaagcaaga

SEQ ID NO: 9113 - DNA, 362 bp, Triticum aestivum
  Clone ID: uC-tsrow189057e11b1
tgtttttcgaccagacaacgcatacgactacctcacttactcgaccggccaaagcaagcaggtcaccatgggcggcgggcacgacatgcacggcggccacagcggcggagtgaagggcttcgtgtccagcctcgtcggcggcggcaaaagccacgggtacggcggccaggggcacggttgcgaccagggctacggcggccacgggcagcagcagcacgggtacggcggccacgtgcagcagcacgggtacggcagccatgggcagcagcaggggtacggcggccacggccagcacgggtaccctccgcccgccgccggtgcttgccccccgtacggcggctacccggcgcaaggctacgcgc

SEQ ID NO: 9114 - DNA, 416 bp, Triticum aestivum
  Clone ID: uC-tsrow189057e12b1
tgctttcgcaccgtctcgccgccgccaccaccgccgcagcttgataagaagaaaaaaagagagagaagaactcgtcgggagggctcgagatctgtgtcgggagagagggaattcttgagatcggaatcggaacaagcgggcgcgctcgggatcggggttaccatacaatttttcccaggaacctttagtgaatgtgctaatggagtcaaagggtggcaaaaagtctagcagtagtagttccctgatgtacgaagcacccctcggctacagcattgaagacgttcgacctgctggaggcgccaagaagttctctgctgcatactcgaactgcgcgaagaagccatcctgatatcgtttttggcatccccttctcgtagtttaggatttttatgcaattttattctgactcttttctc

SEQ ID NO: 9115 - DNA, 159 bp, Triticum aestivum
  Clone ID: uC-tsrow189057f01b1
tggtacaccgcgatagaaggcgcacacacacaatggcaggcacaaaattactagctcttggttttgttgtcctgttgagcattggattggccaatgctgcaagggtggctaggtactccagtgcctctggagtaggaacgggaggaggagagggtgggg

SEQ ID NO: 9116 - DNA, 353 bp, Triticum aestivum
  Clone ID: uC-tsrow189057f02b1
ttgttttttttgagatcatgatgtctgtctacttatcggtaatgcccagatcgacaggagaatgcttatgaaatcatgaagtgcaagtcgaagcaattaacataacgggagatacatggacagatcacgccccgtcaaaaataaaatgaaatacatggacagatcacgctagcatatcagccagttgatccacagatgaacagcgtgccgatcatctgcatacaagcagctctactagtactaggcaaagctgatgttgtaggccttggcaccgacggacctgaagatgccgaaatggcgctcgaacttggcgccgggcttgccgtactggtcgtagaggtcgaacaggaaca

SEQ ID NO: 9117 - DNA, 368 bp, Triticum aestivum
  unsure (1)..(368): unsure at all n locations
  Clone ID: uC-tsrow189057f03b1
ttgctattttctccacagncgaagcaacagaacatcacaagattcagaaaagcacctccatctcccagtcccagcctctctggtgaagagggtcgccgccatggggtcgggatcttgctgctgcatcgggtgcggcagcaacgacgacgacggcggcgacgggggcggcatggggctggaccccaaggggttcctgcttgccatgatgatcgccctggtgctcgtcatgctctgccacatgcccaagccccgccgcaacaactacgtcgtctaccgctgctagccatccacccagatgaaccagcaccggccgtggacggacggatggtggctcgcccgccggcggccggccgatggccgaggtttga

SEQ ID NO: 9118 - DNA, 72 bp, Triticum aestivum
  Clone ID: uC-tsrow189057f04b1
gcctgcatgatctgcccgacccgactccgggaacctggagtgcacgcgaggggagcagtatgtggggttggg

SEQ ID NO: 9119 - DNA, 372 bp, Triticum aestivum
  Clone ID: uC-tsrow189057f05b1
ttgttcacgcgtccgcccacgcgtccgagatacatcatcaacacacaaagacctcatcacatctttccagttcaccggccgttatggagatgaagcccgccgcgcagccggtcaccggcgtccccgtcggcgcggcgccggccgcctggtcctccggcctcttcgactgcttcgacgactgcggcctctgctgcgtgacctactggtgcccgtgcatcaccttcggcaaggtggcggagatcgtggacagggctccacgtcgtgcggcaccagcggcgtgctgtacgcgctcctgtgctcgctcacgggctgccagtggatctactcgtgcacctaccgctccaagatgcgcgcccagtacgcgctcccgga

SEQ ID NO: 9120 - DNA, 401 bp, Triticum aestivum
  Clone ID: uC-tsrow189057f06b1
ttgtgatagctggagcccaaaaccgagcaaaatcgatttcaagcggaccaaaatccggcaccgcatgggtttccccaggcactgatccggcgggtggacgctaatgcggcgccgctgaagggatctgctgcgcccgcggggttcacatggcggcacagaacggcagcggcggcgcggcggtggtcctcaacgtgtacgacctgacgcccataaacgactacctctactggttcggcctcggcatcttccactccgggatcgaagttcatggtctggaatatgcttttggagcccatgatctctcaaccagtggggtttttgaggttgaaccaaaacgttgccctggctatgtctatagaaggtctgtatggatgggtacaactgagatgtctagggcagag

SEQ ID NO: 9121 - DNA, 360 bp, Triticum aestivum
  Clone ID: uC-tsrow189057f07b1
ttgttgctcatccacaacggcaagcccgtctgcgagtcccaggtcatcctgcagtacatcgacgaggccttcgccggcgtcggcccgtccctcctccccgccgacccctacgagcgcgccgtcgcgcgcttctgggccgcctacgtcgaagacaagctgctggcgccgtgggggaaggtgttcagggtgacgaccgacgaggagagggcggagtggacgaggcagacggtggcggccgtgggtcatctggaggaaggcctgagggagtgctccaaggggaagggcttcttcggcggcgactgtgtcgggtacgtcgacgtcctgctcggtagcatggtgccgtgggtgcgcgccaccgag

SEQ ID NO: 9122 - DNA, 305 bp, Triticum aestivum
  Clone ID: uC-tsrow189057f08b1
tgttctcgcacgcaccgtcacaagcagctcaatctctttctccttttcttttctctgccccctcccttatccccacgcccaggaaacgcgtctccggaggaggaagggaagatttcatcttttttgcccccaagatgtcctccccaagcaagcgccgcgagatggacctcatgaagctgatgatgagcgactataaggtggagatggtgaacgatgggatgcaagaattcttcgtggaattccgagggcctactgaaagtatttatcaaggtggtgtctggaaggttagagtagaactgcctgat

SEQ ID NO: 9123 - DNA, 413 bp, Triticum aestivum
  Clone ID: uC-tsrow189057f09b1
tttttggtcgtccccttctccgccctgcgcaccgactaccgcccctacgagtcgcgccgccgcttcgccgcctcctacgacctcttcctcgccgaccgcgccctgctccccatgctgccccgcctcctcggcaaatccttctactccaccaagaaggcccccatcgccgtcgacttcacccgggctggctggccggagcaggtccgcaaggtcctcagctccactttcctgtacctgcggaccgggacctgctcggggatcaaggtgggcaggctggacatggaggaggaggagatcgttgacaatgtgatggcggcagtggaggctgccgtggagaaggtgcccaagaagtgggaaaacgtgagggctctgcatttgaaggctgtggattcggttgcactgccaatttacca

SEQ ID NO: 9124 - DNA, 379 bp, Triticum aestivum
  Clone ID: uC-tsrow189057f11b1
gcgatccttccatcctcggcttgcacatcgcatcacgttaccggagccagctacgggcgcgtgggacagcatggaggggggcggcgaggggaagggccgggcggcgccggcggcggggggagggttcggcgggtacgagtcggccggggaccgcaagtggtggccctggctcgtgcccaccgtcatcgtcgcctgcgtcgccgtctttgtagtagagatgtgggtgaacgactgccccaggcacggaagtgcgctcggcggcggctgcgtcgcgggctttctccgccgcttttccttccagccgctccgcgagaacccgcttctcgggccctccttcaccacttttgggaaaatgggagcttttgactggaacaaagtt

SEQ ID NO: 9125 - DNA, 387 bp, Triticum aestivum
  Clone ID: uC-tsrow189057f12b1
cgcgtgggcagcaagcaaacaagattgagcattcacggatggtggccgaggccgtggcgcaggcgtcgtcggtgttcgccgccttcgacaaggacggcgacggcaaggtgtcggcggccgagctgcgcggctccatgacggcggcgctgggcgaggaggtgtccgaggaggaggcggcggcgatcctggccacggtggacgccgacggcgacgggctgctggaccaggaggagttctcccggatcggcctcgccgccgccggagacgacggtggggcggccggaggcgacgacgaggaggtgaggcggcggtgcctaagggaggcgttcgcgatgtacgcgacggggggcggcgaggagcatggcgccaggatcacgccggcgagcc

SEQ ID NO: 9126 - DNA, 249 bp, Triticum aestivum
  Clone ID: uC-tsrow189057g01b1
ttgctacgcgtccgtgagctcgccacactccccccagcttatcggagctacctcactcaagagaggaaggatggatccctgcaagttccggccgtcgagcagcttcgacaccaagacgacgacgaccaacgccggccagccggtgtggaacgacaacgaggcgctcaccgtcggcccgcgcggcccgatcttgctggaggactaccacctgctggagaagaacgcccacttcgcgcgcgagcgcatccc

SEQ ID NO: 9127 - DNA, 271 bp, Triticum aestivum
  Clone ID: uC-tsrow189057g02b1
ttgctacgcgtccgatcaaacccaaagaggaggaagaacacctaggactcactaccagcgcctctccgcgatccaaatcctcccgggaaagatcttggttgatctcttcctcctcgaccgcctcccaggttcttggtgcagcttttgccagtctcagcaggagatttcatgtctgatcttgacgttcagatcccaactgcctttgacccctttgccgaggcgaatgctggggacgctggtgcagctgccggatcaaaagactacgttcatg

SEQ ID NO: 9128 - DNA, 400 bp, Triticum aestivum
  Clone ID: uC-tsrow189057g04b1
tggtcgccgcctcctccttccgcaggagctccctcctcgtatgcgcgatggtgtacatcaagaaccagaagacaagggcgtactccaagcgtttccaagtcaagttcaagagaaggcgccaggggaagaccgactacagggccaggctgaggctcacaaaccaggacaagaacaaatacaatacccccaagtaccgttttgttgtgcgatttaccaacaaggatgtcactgcacaaattgtgtatgctaccattgctggtgatattgtgatggccgctgcctactcccatgagttgccttgctatggtcttgaagttggcctcaccaactatgcttgagcctactgcactggtctgcttttggctcgtcgtgtgctcaagaaccgtgatcttgatgagga

SEQ ID NO: 9129 - DNA, 432 bp, Triticum aestivum
  Clone ID: uC-tsrow189057g06b1
tgttaaattcagacttgggatgagggtctcgtcaggattttgtgaaggaattcgtatcaaagaggcgaagacagaggcttttactgtgaaagatcacagaggagaattatacaagaaacattaccctcctgcacttaaggatgatgtttggagattggaaaagattggaaaggacggtgcattccacgggaaactaaactcaaacggaatctatacagttgaacattttcttcaacttcttgttaaagatcaacagaagttaagaagtatccttggcactggtatgtcaaataagatgtgggaaagtcttgttgaacatgcgaaaacttgcgttctgagtggcaagcattatatatattactccaaggatacagcaagtgttggtgcaatattcaataacatattatgagttcactggtttgattgctgatg

SEQ ID NO: 9130 - DNA, 257 bp, Triticum aestivum
  Clone ID: uC-tsrow189057g07b1
tgctggccaagacttgtagatgttgtcaaaggctctactttagagaaggttgtcagagttgttgtcatgtccttccgcaatttgttggcaaagggtgcatttgcggcccaaatgattgatcttgggttgccgcatatagtacagaatttgaaagctcaagcatggagtgatgaggatttgttagatgcatcgaatcaactggaagtgggtctcaaagagaacctaaagaggttgaccctcatttgataagtacaaac

SEQ ID NO: 9131 - DNA, 322 bp, Triticum aestivum
  Clone ID: uC-tsrow189057g08b1
ttgattagcatcccaattgagggtccttacaagcctgcggcttaccggtactagagtgtccagcatgactagcggctggcctgagcctgagtcggagcagcggcaccaacgggaactctatcaactatcctgtttcccttctattatcttacatgctgtctcttaggcggaggatttgttattatggttatgttttgagccttgtgagggttgggagaggcggcgtttgcttttgcccagaaataatggcattattattggtttaagtgaggaggtgtgcttttccagatacagttttgtctcgtttgttctaccatgcctg

SEQ ID NO: 9132 - DNA, 414 bp, Triticum aestivum
  Clone ID: uC-tsrow189057g09b1
tctgttgggaggagactaaggacgtgccaaagccggtgacgtactcctactcattcttccacctcatcttctccctggcgagcatgtactcagcgatgctcctgactggctggtcgacctcggttggcgagagcggtaagcttgtcgatgtcgggtggccgtctgtctgggtcaggatcgcgacccagtgggcaacggcaggtctgttcatctggtccctcgttgctcccctcctgttcccagacagggagttctagatcgacctggttacctgctaagagtgcatcatccgtttggagcacctacttatcgtatcgaacgtgtttcggctgtgatgatagctaagctgactatctgtatctggtctgtaatattgtgtgagcaaacccatggcaaggagctggtgtttgtgtg

SEQ ID NO: 9133 - DNA, 278 bp, Triticum aestivum
  Clone ID: uC-tsrow189057g10b1
tctttcgctcggctactgcgacgaacgagaggagggcgttttggtgttcgagtacgcccccaacggcgacctgcacgagaggctccaccggagcggccagaagcgggcggcgctgccgtgggcgcggcggatggccgccgcgttccaggtggcgatggcgctggagtacctccacgagagccaggaccccgcggtcatccacggcgacgtcaaggcgtccaacgtcctgctcgacgccaacatggacgtcaagctctgcgacttcggcttcgcgcacg

SEQ ID NO: 9134 - DNA, 436 bp, Triticum aestivum
  Clone ID: uC-tsrow189057g11b1
tttcgcccacgcgtccgcccacgcgtccgcccacgcgtcctcggacgcgtgggggaagggagtcaatggttgctggattttatcatgtgggctatgaagatccattgcttatgcttatgagaaggagaactgttcatgctggattagttgtgaagggtgaggaaggtgcactttctttgacaaccaaagaaagatcggcccatgcttccaaagggattccagtgaaccactgctcagggttccggacaccaagcagggcaaacttctgcgaaactgacggtatttctagagagagcttcagagttgctgtgaatgctcaggaacttggtttcaaatccactgaaactccaagaactgataaatcagtactgaaaaacttggagctgggtttgtcagcgctgggtggagacaaagggcctgcttatgaccgaatagt

SEQ ID NO: 9135 - DNA, 300 bp, Triticum aestivum
  Clone ID: uC-tsrow189057h01b1
tgatttgaaccgcggggcatatgttcaggagccggattttgtgaatgatgggatgcaggggggccaggtccagctgcggcgtgatcccagcagggcgaacggtggcggccagccgcagtcgcgttcgttcacctatcagagctccacggtgactttatggtgggattaatggagcctattataccgcttccaagacccggaggagtggcagcgatgggattactgtcgaagaaagcaaggaagcagacactacgactaaagaggccactcataggatctccaggggaattcatgataagg

SEQ ID NO: 9136 - DNA, 408 bp, Triticum aestivum
  Clone ID: uC-tsrow189057h04b1
ttgtctgttgctcgccgccgtccccctccgcctccgcgcacccaggaaagatggcgtcccacattgtcggatacccgcgcatgggccccaagagggagctcaagtttgccctggagtctttctgggatggcaagagcagcgccgaggatttggagaaggttgccaccgacctcagggccagcatctggaagcagatggctgatgctgggatcaagtacatccccagcaacaccttctcctactatgatcaggttcttgacaccaccgccatgctcggtgccgtcccagaccgttactcatggaccggtggggagatcaatttgagcacctacttctcgatggctaggggcaacgccaccgtccctgctatggagatgaccaagtggttcgacaccaactaccacttta

SEQ ID NO: 9137 - DNA, 365 bp, Triticum aestivum
  Clone ID: uC-tsrow189057h05b1
ttgttgacgcgtgggtcccccgcaagcagccgcaagccgtcgaggccgacggcgacgggagccccccaatccccaaatcctgcggcgcggggcctcaaattcggcgccgcgcagcagcctcggtccggcttatggatccagatgttctcgtgggcccgtagcaagcagtcctcgcccgcctcctcctccggccgccgcggcggggacgccgccgccgccatggactccggaagcagccgccgcagcggcggggggagcgggcacggcagcggcagcgggagcgggagccgcggacgcagcccgcggctggagcggcgcaacgcggcgaagcacatcgactacgaggcgggcgcggcggcgacgac

SEQ ID NO: 9138 - DNA, 54 bp, Triticum aestivum
  Clone ID: uC-tsrow189057h06b1
tgtttgggtcggcctcgtcaaggccttccagagcgcctacttcgtcaggtacgg

SEQ ID NO: 9139 - DNA, 236 bp, Triticum aestivum
  Clone ID: uC-tsrow189057h07b1
tttttgaccacatcctccccccaatctcgctccctccctccctaccacgctggtccctgcgaggcggcgcggcgagcgcgagcagtcgggtccggtcaaagccaggcggcgatggcgtcgtcggcgccgggcggcggcagcgggaagatcgagcggctgtcgtcgatcgacgcgcagctgcgcctgctcgtcccggccaaggtgtccgaggacgacaagctcattgagtacgacgc

SEQ ID NO: 9140 - DNA, 273 bp, Triticum aestivum
  Clone ID: uC-tsrow189057h08b1
cccacgcgtccgcccacgcgtccgtttcaactgttctatgtgatgggagatagtatcttaacaaggtctgatctggaagctgtattggcgttcattcatgaaaccatatttgcagataataaggaagccaaggaaggttcaaacaagagtacatttgaagcatttcacaactctgcggtattttcaaaggatgctgaaggggtctctgagaagtctatgtcattatcagactttagaaactggtgtattgtcatgccatcactgaggaaattc

SEQ ID NO: 9141 - DNA, 245 bp, Triticum aestivum
  Clone ID: uC-tsrow189057h09b1
tgttgcccacgcgtccgcccacgcgtccggggacgctttgtttgcaaagaaatgtgatggattgccacttgcacttggagttttgggaggttatctgtctaaaaatctaaatgcacaaatatggtccgatatactctttgattggccagcaaccaaggatggacaaatgatgagtgtcatactggcacgcagctacaaggacctaccgaatcatcatttgagatcttgtttactttattttgctg

SEQ ID NO: 9142 - DNA, 367 bp, Triticum aestivum
  Clone ID: uC-tsrow189057h11b1
tcccacgcgtccgaattaaaattgatcactgatctgataggatcaccagatgattctagcctaggatttcttcggagtgataatgcacgaagatacatgaagcaattaccacagtacccaaggcaggacttccgactgcgcttgcgcaacatgtctgatggtgcagttgatctattagagagaatgctggtgtttgacccaagcagacgcatcactgctgatgaggctctgcatcacccatacttggcttctcttcatgacatcaacgaagaacccacttgtccggcacctttcagctttgattttgagcaaccatcttttacagaagaacatatgaaagagctcatctggagggaaactttagcat

SEQ ID NO: 9143 - DNA, 325 bp, Triticum aestivum
  Clone ID: uC-tsrow189057h12b1
tcccacgcgtccgaattaaaattgatcactgagttgataggatcaccagatgattcgagcctaggatttattcggagtgataatgcacgaagatacatgaagcaattaccacagtacccaaggcaggacttccgcctgcgcttccgcaacatgtctgatggtgcagctgatctattagagagaatgctggtgtttgacccaagcagacgcatcactgttgatgaggctctgcatcacccatacttggcttgtgttcatgacatcaacgaagaacccacttgcccggtacctttcagctttgattttgagcaaccatcttttacag

SEQ ID NO: 9144 - DNA, 350 bp, Triticum aestivum
  unsure (1)..(350): unsure at all n locations
  Clone ID: uC-tsrow189059a03b1
ttgagtcncaagtttccaacttccaacagaacggagatggcgagcagacagttgccggcaatgctgctgctcaccgcggtgacaatggccggactggccgccggagcgcgcgcgggcggcatcgcgatctactggggccagaacggcaacgagggcacgctggcgcaggcgtgcgcgacgggaaactacaagttcgtcaacgtggccttcctcttcaccttcggcaagggccagaagccgctgctgaacctggccgggcactgcgacccggcgaccagcggctcgtgcaccttcgtgggcgccgacgtcaagtcctgccagagccgcggcatcaaggtcctgctctccat

SEQ ID NO: 9145 - DNA, 405 bp, Triticum aestivum
  Clone ID: uC-tsrow189059a07b1
ttcgctcgagaagatcggattcgatttggatttctagggtttgttcatcctcatccccatcccctcctccgtcgccgtccgtcgtcttccccacctccgatcaaatttgtgatttttcatcgatttccataagatatgatccccaactccttcgacaccttcctctgatctgtccccccaggaaatcccacatccagattccacatactatggtgcgccgccgcccgtcttcctcctcctcctcctcgtcgccgatgctccacaagaacctccgcgcgctcggccccggcctcaatccgtttgcccccttcggcatgggcaactactcccgctaatcccccctcccctcccctctcctttgctctgatttgcttttctccccggatccgatttggttctcccccc

SEQ ID NO: 9146 - DNA, 391 bp, Triticum aestivum
  Clone ID: uC-tsrow189059a09b1
tccaacaactggctatcttggagctgggtatcaagaatctatggaatcgtcattctcacccattactccaagtgaaacacaaagtccagctcatggaaatcggcaacaaccatatatggaatctccagttgccttgagaccacattttccagctgataggaaatgggctcttgggcttcagtctcgagcacatccaagagaagttatgactgaagtgctgaaggctctgcaagaactgaatgtatactggaaaaaaattggacactataacatgaaatgtagatggagtcctcctggctttcccggtcaggagaatatgaatcataccaattataacttcagtgcagagcctattgaaaccgacgacctgggtgacaagttaaatttaatt

SEQ ID NO: 9147 - DNA, 257 bp, Triticum aestivum
  Clone ID: uC-tsrow189059a10b1
ttcgctcgcccacgcgtgcggtaggactaggttcagtttgccaccctcttccactccgggcattttcttgcatccacgacggcaatggccaccgctgatgtccagaacccgacggccgtgctgacggaggaggcgcccgcggtggagacgcccgtcgccgcacgtggaggccacgaagacggtggaggtccccgcgccggcggaggccgaggtcgaggcgcttgtccccgtcgaggttgaggagaccaaggaggagg

SEQ ID NO: 9148 - DNA, 229 bp, Triticum aestivum
  Clone ID: uC-tsrow189059a11b1
ttcgttgtagacgcgtgggcggacgcgtgggggcgactgcttcacctccaacacggcggcgttccgcaaggcggtggagcacctgtcgcagtactctggcgagggcggcggcggcggcatgctctacgtgcccgccggccggtggctcaccgtgccattcaacctcaccagccacttcacgctttttctacacgccgacgccgtcatcctcggcacgcaggacgtgacc

SEQ ID NO: 9149 - DNA, 336 bp, Triticum aestivum
  Clone ID: uC-tsrow189059b02b1
tcgggtctcccctcaccagcaacccaccgcaccaaacaccggctcctccccgccgctctcccgccatgaagcagctccacaagtcccccacccacgcgccgtcgccggcgcacgcgccggcgtgcaagatctccaagcccgcgcgccccgggccgcgcacctgggtcggctacctcctccgcgagcagcgcctcctcttcgtcctcctcggtgcgctcatcgccacctccttatttctcctgcggccctacctcttctccctgtcagcctccaaccccaccgagcgaagccccatcttctccttcaccggccactcgtcggactcccgcggcgtcc

SEQ ID NO: 9150 - DNA, 387 bp, Triticum aestivum
  Clone ID: uC-tsrow189059b03b1
cgttctcctgatccgccgtcccgccgggtatctaccactgaactgtgagataaagtgctttcagttgatgcaagagggtgtgcacacatcttcatctatggcctactattgattgctctgcagtgatcagtttgaagtcttctttcttcctcttgctacgagttttcttgcttctctggtgggctacaggagaggtggaagcagataaaggcagacaggcagctcagccattctatgtccagggacttggattgtcctgttcagacacagatggctgttgcagtcctggatcggagtttcagcagtgactatcctgcaagtagcaaaactgaggggagacctttgagctggaagagagtttttgttcaaactgataatggttctgtc

SEQ ID NO: 9151 - DNA, 261 bp, Triticum aestivum
  Clone ID: uC-tsrow189059b04b1
ctcgcctacgcgtccggtgtggtgaaggtacactgatgtgcttgaggagttgaagaagaacccatagagccatggaggacctcctgattgcatagcttcgtgagctaatccttagagaattggggcttcatgacatcttcaagaaggctaaggacgaggagaacgctcaggctctgtcactgtttgagggagttgttcagcggaatgatgaaatagaagatggtgagaaacgagcagagaacttgatccgtggaatcttag

SEQ ID NO: 9152 - DNA, 324 bp, Triticum aestivum
  Clone ID: uC-tsrow189059b06b1
tcgatgacacgagccgatccatccatcctgaaaaaaaaagagtgccggtcgaaaatgccggtgagcaggatcgccatcggcgccccgggggagctgtcccacccggacaccttccgcgccggcgtcgccgagttcatctccatgctcatcttcgtcttcgccggctcaggctccggcatggccttcggcaagctgactgacggcggcgcgacgactccggccgggctgatcgcggcggcgctggcgcacgcgttcgcgctcttcgtggccgtctccgtgggcgccaacatctcgggcgggcacgtgaacccggccgtcacattc

SEQ ID NO: 9153 - DNA, 394 bp, Triticum aestivum
  Clone ID: uC-tsrow189059b09b1
tttcgctcgataagccctcttttgagtgtgtagtacagacaataattttccagggtagcaagaaagagtgaaagcacaatggtgaagctcgcattcgggagctgtggtgactccttcagcgccacgtccatcagggcgtatgtggcggagttcatcgccaccctcctctttgtgttcgccggcgttgggtccgccattgcctatgggaaaatcaccgatgatggcgctctcgacccagttggccttgtggcgatcgcgatcgcccacgccttcgccctcttcgtcggtgtcgcgatcgccgccaacatcttcggcggccaccttaaccccgctgtgaccttcggccttgccgtcggcggccacatcaccatcctcaccgggatcttctactggg

SEQ ID NO: 9154 - DNA, 302 bp, Triticum aestivum
  Clone ID: uC-tsrow189059b10b1
ttcgtttctaatttgacatacactatggatgatcgcactaagttatcagagcgcttccatactgtatcggatagcgttggaatgaagtcagaagttaaggtcgtgccggttcgcgagcaagctactttcttgagaaaacgattcgttccaggtgctttcggaactttacccgtacccagctttggccgtgtgttgtcaaaactgcctgtgagggcgaattttaacgcctctgtcactgacgatgattatatggcgggcaagctactgtctgccgcctatgagcatcggcacattgctagttt

SEQ ID NO: 9155 - DNA, 327 bp, Triticum aestivum
  Clone ID: uC-tsrow189059b11b1
ttcgttcgcggacgcgtgggcggacgcgtgggcaaaccttagttgcatcccacccacgaccggccggcaatccatggcgctgcgcaacctggccaagaagttgcggatccccacctctgctgctgcccggctcccgtccgcccccaaccctgctgatttccggttcccatcggaccctggcgcttggcgggcgtccgtttctcggctcgagagcgctagagactggtatgagtttcagcgagcacgttatgatgatgtgacaacagagttaaaaaacttcaggcgtgaggttgtgtggactgaaagggcggcttacctgtttgattt

SEQ ID NO: 9156 - DNA, 314 bp, Triticum aestivum
  unsure (1)..(314): unsure at all n locations
  Clone ID: uC-tsrow189059b12b1
acgcgtgggcggacgcgtgggcaaggttcttttcgcatcccacccacgaccggccggcaatccatggcgctgcgcaacctggccaagaagttgcggatccccacctctgctgctgcccggctcccgtccgcccccaaccctgctgttttccnnntcccatcggaccctggcgcttggcgggcgtccgtttctcggctcgagagcgctagagactggtttgagggtcagcgagcacgttatgatgatgtgacaacagagttaaaaaacttcaggcgtgaggttgtgtggactgaaagggcggctaacctgtttga

SEQ ID NO: 9157 - DNA, 323 bp, Triticum aestivum
  Clone ID: uC-tsrow189059c01b1
ctctatttcacgtttctcgtgtgaccggcgtggaacattttccatttctcatgggatgtcatcggccagactctatataaaggtctcccatccttgtatcattggtgccccgccatgaagtgcccttccgattcctcggctggtcgtgatccctgggctcctcctcccgcttctggcggtggcggctccagcgagccagccaagaagcggcagcggacctcgagctcgagccaggctgaggcatcctcctcgtcctcacagcctccgccgcagcagccgggggacgcgagagaggtgccggatctgggggaggacgtgatgtt

SEQ ID NO: 9158 - DNA, 243 bp, Triticum aestivum
  Clone ID: uC-tsrow189059c03b1
ctcgcctacgcgtccggacggagtcacaaccattgatgttaagtcataggagtacaagaacaaacaagctgttggacatcctgtgaacagctggatgaatgcaaagattggcttggcagccgaggacattgctttgccaagtgctatttctgccaaagttgttcatccatgggatggcccgggaacataccatggaggacccaaactttcaatttatggcttgcctacggattttgctggccc

SEQ ID NO: 9159 - DNA, 365 bp, Triticum aestivum
  Clone ID: uC-tsrow189059c04b1
ctctgctatggggtaatctggaaaggggacgagctgattcaatgggtccccgagacgctggagtcgctgcgaaaattgggcaagaaattagtttttgtaacaaacaattctaggaagtcgagaaggcagtattcaaagaaattcaaaacacttggccttgaagttcccgaggaagagatcttcacgtcatcatttgcagcagccatgttcttgaagttaaataatttttctccagaaaagaaggtttatgttgttggtgaggatggcattttggacgagctcaagttagctggctttgaatgttttggtggtccggaggatggcaagaaaaacatactgttggaggcaaacttctactttgacca

SEQ ID NO: 9160 - DNA, 342 bp, Triticum aestivum
  Clone ID: uC-tsrow189059c05b1
tgcctccatacgtggcgttaactagctatcttgcagttctttctatagaagagagcggtatttcagaaggattagctgcaattaaagcagaccgagcagcagagagcatatctcacagaagtgcccaacttcatgggggcacagaagatgaactctcactgaaagactctttggcggccgtgagaaatgcacctcaagcagcggctcggattcagaatgccttccgtgccttttctttgaggaggagacaacacatggacgctcgacttaaggatgaatatgggatgacacacgacgatatagatgaacttgcagctgcatcaaggttatactaccaacatc

SEQ ID NO: 9161 - DNA, 349 bp, Triticum aestivum
  Clone ID: uC-tsrow189059c06b1
tcggtcgctgccgagccgaaggaggagctgatctggttcgtgccgctggtgggcggcgacgagcgctcggacacggtgctcctcaagttcctccgcgcgcgcgagttcaaggtcaaggaggccatggcgatgctcaaggcggccgtgctgtggcgcaagagcttcggcatcgacgcgctcctcggcgccgacctcggagtgccggagctggagaacgtggtgttctaccgcggcgccgaccgcgagggccaccccgtctgctacaacgtctacagcgagttccaggacaaggacctctatgagaaggccttcggcgacgacaagaagcgggagcgcttcctcaagtggc

SEQ ID NO: 9162 - DNA, 329 bp, Triticum aestivum
  Clone ID: uC-tsrow189059c08b1
atctcctagagcagtttgctgagggtgtgtttaagaccatagctgtcactcctgaggagaatgaagctatacttcgtcttgaaggaatgggctttgaccgggcgcttgttctggaggtgtacttcgcctgcaacaaggacgagaccctggccgcaaactacctgttagaccacatgaacgagtttgacgacggagcgccgcagtaagacaaagcaggttgtttctgaatacatgcacaagcccatgggaacaagggtgtggggagactgatactcctgcactcgcagggcaggccttagagatctttttgagattttgtctcgtccttt

SEQ ID NO: 9163 - DNA, 289 bp, Triticum aestivum
  Clone ID: uC-tsrow189059c10b1
ttcgttcgcccacgcgtgcgaagtgcatcatctatcgtttgttttccctcaatctctaagccgatagaaaggtgagagttgaggggtaggtcagccgaccggagggctgtggaccatgtctggcgtgtgggtgttcaagaacggtgtggcgcgcctggtggagaacccggggagcgagcggacgtctacagtgcgacagaaggcgctgctgcacacgcctagcgggcaggtggtgtcgtcgtacgcgacgctggaggcgaagctgacggcgctggggtgggagcgctac

SEQ ID NO: 9164 - DNA, 342 bp, Triticum aestivum
  Clone ID: uC-tsrow189059c11b1
tcggagatgaccaagctctctggtatctctgacatcatccctgagacggaggtctgtgacttcgacttcgagccctgcggctactccatgaacgccatcaacggatctgccttctccaccatccatgtgacccccgaggacggcttcagttacgcgagctacgaggtcatgggcatggacgctccggccctggcctatggcgacatcgtccagagggtcctccggtgctttggcccttcagagttctcagtggcggtcaccatcttcggtggccgcggtcatgccggcacctggggcaagaagctcgacgccgaggcatacgactgcaacaacgttgtggag

SEQ ID NO: 9165 - DNA, 268 bp, Triticum aestivum
  Clone ID: uC-tsrow189059c12b1
ttcgtcgccacgcgttcggtcagccactacccggcgtgcccgtgcccggaccttattaccgggctccgtgcgcacaccgacgccggcggcgtcatcctgctgttccaggacgacaaggtaggcggcctcgaggtactcaaggacggcgagtggctcgacgtgcagccgctccccgacgccatcgtcgtcaacaccggcgaccaagtggaggtgctcagcaacggccgctaccgtagcgcgtggcaccgcgtcctgcccatgcgcaacg

SEQ ID NO: 9166 - DNA, 318 bp, Triticum aestivum
  Clone ID: uC-tsrow189059d01b1
ctcgattgcacgtttctagagtgaccggcgtggaacatttcccatttctcatgggatgtcatcggccagactctatataaaggtctcccatccttgtatcattggtgccccgccatgaagtgcccttccgattcctcggctggtcgtgatccctgagctcctcctcccgcttctggcggtggcggctccagcgagccagccaagaagcggcagcggacctcgagctcgagccaggctgaggcatcctgctcgttctcacagtctccgccgcagcagccgggggacgcgagagaggtgccggatctgggggaggacgtg

SEQ ID NO: 9167 - DNA, 172 bp, Triticum aestivum
  Clone ID: uC-tsrow189059d03b1
aaaggggacgagctcattcaatgtgtccccgagacgctcgagttgctgcgaaaattgggcaagaaatcagttttttgtaacaaacaattctaggaagccgagaaggccgtattcacagaaattcaaaacacttggccttgaagttcccgaggaagagatcttcacgtcatca

SEQ ID NO: 9168 - DNA, 310 bp, Triticum aestivum
  Clone ID: uC-tsrow189059d05b1
tcagtcgttgccgagccgaaggaggagctgatctggtgcgttccgctggtgggcggcgacgcgcgctcgcccacggtgctcctcaagttcctccgcgcgcgcgagttcaaggtcaaggaggccatggcgatgctcaaggcggccgtgctgtggcgcaagagcttcggcatcgacgcgctcctcggcgccgacctcggagtgccggagctggagaacgtggtgttctaccgcggcgccgaccgcgagggccaccccgtctgctacaacgtctacagcgagttccaggacaaggacctctatgagaaggcct

SEQ ID NO: 9169 - DNA, 252 bp, Triticum aestivum
  Clone ID: uC-tsrow189059d06b1
accacctaatttaggtgtactaggttttgcgccaatattgtttaacctcccgctaaaaggtcccaaattagcgtctttgttcccaccaaaaaattatggttccgctaaataccttgctaacaacccacgaatatataattctagaccaaacgacggcgtcttcacgagcgattggatctgagctctcgtctcggttcatctgtgctgccggcgtcatgacggcgtcaatagagcgaaccacgtcaggtgcac

SEQ ID NO: 9170 - DNA, 408 bp, Triticum aestivum
  Clone ID: uC-tsrow189059d07b1
ttcgctcgccacacaccacccgtctcgtcctagctgcttactcctaccgctcgccactcctccgccccagctctgctcgccctcgaccgcggctcgccaggaaggtctggtttgcatttcctttcaagtataaaagcaactatattcagcatggcatttgagtaagcatcagaacctcaaaagccaagtttgtcagcaatattatacctttattggtgcaacacttccgtagagaagatggtggatgacctgttttatgagggcaacactgatcacagcatcagctctgaggacgaagacacacttgtcaggagttgtagtaatctcagcgtaagctttggatattattgcaattcttatcagagtttccctcttgaaaatgatgagcatgacacctctccccagatg

SEQ ID NO: 9171 - DNA, 335 bp, Triticum aestivum
  Clone ID: uC-tsrow189059d08b1
tttcgttcgcgcgccatggaggacggggcttcggatttcagcgtctgggaggtgctatctgcatcctcgggggtcggaggcgatgacgccgtccttgtgtccggggaaggcggcgacgtcctccacgaccacttcgccctcgactcctcttcctccactggcttctccggcgagggctcgtggtcggaggctgcctccgacgacgtggaaattgaatccgggttaggatcagtggacagatttggttctgctatgcaagagcagacggatcttattggggtggtggattccagcgcacagttgcaattaggctggattgatgtgactgcacaagc

SEQ ID NO: 9172 - DNA, 177 bp, Triticum aestivum
  Clone ID: uC-tsrow189059d09b1
gaagtgcatcatgtatcgtttgttttccctcaatctctaagccgatagaaaggtgagagttgaggggtaggtcggccgaccgaagggctgtggaccatgtctggcgtgtgggtgttcaagaacggtgtggtgcgcctggtggagaacccggggagcgagcggacgtctacggtgcga

SEQ ID NO: 9173 - DNA, 292 bp, Triticum aestivum
  Clone ID: uC-tsrow189059d10b1
tcagtctgtctccttgtctcatgcgactccggccttgcttctatggtggggacaagaacccggacgtggatttgtacttccacccgtaccgtctccagcagctgcgatctatgtggcgtgatgacattggccttctttgccgtggcaagggggagttcgtggtggcgcagctcacatttggcggccagctctgcgtgctacaccataaacctggggaggagcagggcgacatgaattggagcgtttaaaatatgcccttacctgacggcgatgacatcccaaacctgctgcg

SEQ ID NO: 9174 - DNA, 302 bp, Triticum aestivum
  Clone ID: uC-tsrow189059e01b1
tcgcttctcgccacgcccaaacccaaagccaggtcgcactccttctgctcctatcctcttcctcgccgaggcggggaccggccagcgccgccaccgtcaccgcccgcgcatctccgttcaattcggcgaatttggggctgaggaaagaggaggaacgacttttcgctggtggcctgaaattcaggacaagatgcactttcttgcatcatttcacggccctgcaggttttgagcttctgtctgtttcgctgggatggatgccaagaagttcctgcagatggtcgaagacaagaagaagagact

SEQ ID NO: 9175 - DNA, 281 bp, Triticum aestivum
  Clone ID: uC-tsrow189059e02b1
tcgctttcgccacgcccaaacccaaagccaagtcggactcctcctcctgctattctcttcctcgccgaggcggcgaccggtcagcgccgtcaccgtcaccgtccgcgcatctccgttcaattcggcgaatttggggctgaggaaagaggaggaacgacttctcgctggtggcctgaaattcaggacaagatgcacttccttgcatcatttcacggtcctgcaggttttgagcttttgtctgtttcgctgggatggatgccaagaagttcctgcagatggtc

SEQ ID NO: 9176 - DNA, 230 bp, Triticum aestivum
  Clone ID: uC-tsrow189059e03b1
tctttttcgtccgaagcctttctccaatagcggaagtttcgcgccatgtgaagaaaagctagaggaagcccaggaaaatctgggtatccgaccacatgattatgttccagtaacttatgttgctgaagtaaattggttccaagaagagatgagatttgccccaacagcgttccttgttggactactatattttatggggaaaaggatgcagagtggatttaatattggag

SEQ ID NO: 9177 - DNA, 365 bp, Triticum aestivum
  Clone ID: uC-tsrow189059e04b1
tcgtttgacttgcgcatcccacctaacaccgcccgtggtctgggagctgccgccgccgccgcggagcaggggactcgatgggattcgacgggctggtcgttgtgtccgacccttacctgcagcgccgcttcacgcaggcggacctccgcgcgctccaggcacagtacgcggggctgcgggacacggcgcccaccggcaggctgcggctgcgggaccttcccgccgcgctgaccggcctggggagccccaccgctatggccgccgataaaggggaagcgctgcgcggggacgccgggaaagagatcagctcgccgcccgagcgggcgctcacggacgaggagtggtcctccgtgctcacggctgtc

SEQ ID NO: 9178 - DNA, 325 bp, Triticum aestivum
  Clone ID: uC-tsrow189059e05b1
atgactgtctacttcccgtacgctgagattgcaagaggctcaccgccttccactctgaaattgaggagctcctgtacagcgatgttgagaacgatgaacacatgtttgtgttgaaggacaggaacaagccaatcatcttttcaatggctcgtcttgaccgtgtgaagaacatgactggcttggttgagatgtacggcaagaatgcacatctgaaggatttggcaaaccttgtgatcgttgctggtgaccatggcaaggagtccaaggatagggtggagcaggccgagttcaagaggatgtccagtctcattgaggagtacaagct

SEQ ID NO: 9179 - DNA, 349 bp, Triticum aestivum
  Clone ID: uC-tsrow189059e06b1
ttgttcagcgtccgcccacgcgtccgtccatgtttgctagatctgccgtgcttctccccttgctgcccgtaccgactcccggttcttttctccggttcctcggcgatggtcgtctgcaaatgccgcaaggcgacgagggtttattgcttcgtccaccaggttccggtctgcggcgagtgcatctgcttcccagaacatcaattatgcgtggtgaaaaactatgctgaatgggttgttaattctgattatgactggccacaacactgctctttgtgtaatttagttctagaagctgcaagcgaagaaactacacgattgggttgcctccatgtgatgcacacaaaatgct

SEQ ID NO: 9180 - DNA, 319 bp, Triticum aestivum
  Clone ID: uC-tsrow189059e07b1
ttcgttcgtccacgcgtacgccacactctaggatctgtttctgactctgttccgattcgacccgatcctgctggccgccgtcgtcgccgtcgccgtcgcgctgcagctgggctcgtccgaccacgcgtctccgaggatggaccagccgccggatggcttcgccgccggaggtcttttcgttcagcacattgatgggcaaaaagcttctccccctgctgtaattgtgattggcggagggatttcaggcattgcatctgctcgtgccttgtcaaatgcttcatttaaggtcacattgctagagtcgcgggagcgacttggt

SEQ ID NO: 9181 - DNA, 131 bp, Triticum aestivum
  Clone ID: uC-tsrow189059e08b1
tccagatttggccgccccaccggcgctggcccgccgccagatcggagcgcggccccggtccgatcccgctgcgccctccccagggacatgggaatggaggtcgtcggagctgaagctgcaccagcacaggt

SEQ ID NO: 9182 - DNA, 374 bp, Triticum aestivum
  Clone ID: uC-tsrow189059e10b1
tcgggtacctcgccgggaagatcaccgtcttcgaccgacgaggacacgttgcaaagctgtgcgccgtcatcctgcctctcctcgtggccgcgctcatcgccatctcgcgggtagatgactactggcaccattggcaggacgtcttcgcgggcggcatccttggtcagaagctcgcgcctattctttgttatctctgaactctttttttttttactattcctgtttttgcgggaaatctccaaactctctttgttgctgacgaggtttgtcatgtccgtgaaggaatggtggttgcgtctgtttgctacctgcagttctttccaccaccctctgatgacaaaggcttctggcctcatgcccacttcagggacatc

SEQ ID NO: 9183 - DNA, 363 bp, Triticum aestivum
  Clone ID: uC-tsrow189059e11b1
caagcaagcattggccaattcaccatggctgggcttcagctctccgtcctagcggctgcgccgcctcttgtgctcgcgcccctccatcgccgggaccccgacatgctccaggacgtctgcgtcgccgacctggcatccccgatcaagatcaacggcttcccgagcaaggccaacatcacggcggacgacttcttcttcgccggtctgaagaaggccggcaacaccaagaacccggctggttctgtcgtcacggcggcgaacgtgcagtcattccccggggtgaacacgctcggcgtgtccatggcgcgcatcgactacgcggttggaggacagaacccgtcgtacacccacccgcgcgccacc

SEQ ID NO: 9184 - DNA, 279 bp, Triticum aestivum
  Clone ID: uC-tsrow189059e12b1
gcccgtaccgactcccggttcttttctccggatcctcggcgatggtcgtctgcaaatgccgcaaggcgacgagggtttattgcttcgtccaccaggttccggtctgcggcgagtgcatctgcttcccagaacatcaattatgcgtggtgaaaaactatgctgaatgggctgttaattctgattatgactggccacaacactgctttttgtgtaaattagttctagaagctgcaagcgaagaaactacacgattgggttgcctccatgtgatgcacacaa

SEQ ID NO: 9185 - DNA, 243 bp, Triticum aestivum
  Clone ID: uC-tsrow189059f01b1
tcgcttcgcgtccgtccacgcgtccggacagaaatcgtcctttcgttaggctagggcgaggcgagagtagattggatctcgagctcagcacgcggcggccatggaggacgaggagcacgaggtgtactgccaggagatccccgtcgacggcgaggacgtcgacatgggcgccgggggcgacgacgccgccaagctgcacgagctcgactagatgaagcgccgtctcaaggagatggaggagga

SEQ ID NO: 9186 - DNA, 228 bp, Triticum aestivum
  Clone ID: uC-tsrow189059f02b1
tcgctacgcgtgcgcccacgcgtccgccggagtgggttcctgcctgccgctgcggggcaccatcaccgactccggcgaccttgtgccactgtgctacatcgccgggctcatcaccggacgccccaacgcgcaggccaccactgttgatggcaagaaggtggacgccgccgaggcattcaaggcgccctggcatcgagggcggcttcttcaagctcaaccccaaggagg

SEQ ID NO: 9187 - DNA, 399 bp, Triticum aestivum
  Clone ID: uC-tsrow189059f05b1
cttgggtcttgctctcttcgccttcctccccggccgggtttttctaaccctaggcgccgtcggccaggaagcccatttaccagccatgtttggacgcatgccaaggaagaccagcaacaacaccaagtactacgaggtgcttggtgtatccaagacagcaaccccggatgagttgaagaaagcttaccggaaagctgctataaaaaaccatcctgataagggcggagaccctgagaagtttaaagaattggcacaagcttatgatgttctcaatgaccctgaaaagagggagatttatgaccaatatggagaagatgcaatcaaagaagggatgggaggcagcggcggcgctgatatgcatagcccctttgacatattcgaacagctatttgggggtgg

SEQ ID NO: 9188 - DNA, 394 bp, Triticum aestivum
  Clone ID: uC-tsrow189059f06b1
ttgattggtggtaatggttctctgcagagattttctgttttcaatcacaggtgaatggcgtgcggcaggatgagcaagctgaagcctaggaaacttgtgcacatacagcttcgaagagaggtagagaccgaagtgagcagctgctgccgaaaaggccttgaaactcggaaccgagcttgcagacaatgtgcatctgtttccctttgccatttctggcgcagggtccggctcgtcaaagttgggatgaagcatagcaaggttttagatagatcaagggggaaaattttccggtccggtcgtgttatttcttggatagcgtttgttcattctgggtcgactctgtttttccgtcgtcgcaatttttctggacagagcagagtgtgcaacctgtaag

SEQ ID NO: 9189 - DNA, 265 bp, Triticum aestivum
  Clone ID: uC-tsrow189059f07b1
ttcgttcgccacgcgtccgctccgcggcatgtacggttacgcccccacgccggcgcccgaccggccggcgtcgccccccgtcccgccgctcccggcgccatcgcggcaacaggcgaccgcgcggcggacggcggacgaggtgtggagagagatcaccggcggtagcggcggggaggaggaggcggccccggcctccgctggcggggccggggagatgacgctggaggacttcctggcgagggaggacggcgccgtcgtcaggggg

SEQ ID NO: 9190 - DNA, 220 bp, Triticum aestivum
  Clone ID: uC-tsrow189059f08b1
tctcgctcgcccaatcccaccgtggtgctggacgcctgcctggtcgtgggccacctcatccccatggtggagctcgccaagctctccctcggccgcggcgtgcccgtcgtcatcgccgacccgaccccgccggcatccaccgccgacttgttctgctcctccgacttcgccgccgccgccatcgaagccgccaacccttgcatcgccttccaccacctcc

SEQ ID NO: 9191 - DNA, 418 bp, Triticum aestivum
  Clone ID: uC-tsrow189059f10b1
ttcgttctgccatggtgtgcgtggcgtgcctgatccggctctttctcatccccttcgtcaacgcgctcccctacctttttgacctcctcctcagcaaggtttatcgcatgcttggatgggaatacaggaggcccgagagagtcccagctgcctgcccgttcaagcctgcagcaaacaagactgaaggtgtggtgggtgaatcaaaaccagtagcaaatcctcatgttgctagtgcaaatcctctggtggaaccccagagtgctaccacagaaatgaagaaagatgattagaacatgtaacggtcgcccgatttgacttatgtgaacaactcactatttgtatttgagattgtgtcgtaaccgagaaataattaatgtaagattgtatatttgggcaagggattgctaaaatattccca

SEQ ID NO: 9192 - DNA, 319 bp, Triticum aestivum
  Clone ID: uC-tsrow189059f12b1
acccccgcagccaatcccaccggacgcttgcctgccagccaaccccaatctcgactcctccgacgtcgaatccggttccgagtccatatttgaggtgccaccatgttcaacaggttatttgggaagcccaaggagcaggccaacgccggcgcgttggccactttggataagttaaacgagactcttgatatgctggagaagaaagagaaagtgttagagaaaaaagcaggtgctgagcttgagagggccaaggagttctcaaaagcaaagaataaaagagcggctatccaatcattgaagaggaaaaaactttatgagc

SEQ ID NO: 9193 - DNA, 396 bp, Triticum aestivum
  Clone ID: uC-tsrow189059g04b1
tttctatgcgtccgcgcgacctcctgtttccgcccaccttctccggctccggcgccggcgaaccaatcgcggatcgagcgattcctccgatcaggagaggcgagccgggaggaagagcacctacgcgggaggagacgagatggggctcacgttcaccaagctgttcagccgcctgttcgccaagaaggagatgcggatcctgatggtgggtctcgacgccgccggaaagaccaccatcctctacaagctcaagctcggggagatcgtcaccaccatccccaccatcgggttcaatgttgaaactgtggagtacaagaacatcagcttcactgtctgggatgtcgggggtcaggacaagatcaggccactgtggaggcattacttccagaacacaca

SEQ ID NO: 9194 - DNA, 394 bp, Triticum aestivum
  unsure (1)..(394): unsure at all n locations
  Clone ID: uC-tsrow189059g06b1
ttggttctctcccactactactagnagncgtgtttgttccttttacgcttgcacatcagcgctaatccaatccatccatcccctaatcaccaccgccgccggcctaatcccctttcctctgctacgcgcgcgatggcggcggcgacggctccggtggaggtgcccgtggcggcgccggtgaggactgtgaaggtcacaaatgtttccctgagtgcaactgagcaagacattaaggagttcttttctttttcaggagacattgaacatgtggatatgaaaagtggtgacgagtggtctcaagttgcatatgttacttttaaagatgcccaaggagcagagactgcgctccttttttcgggcgcaacaatagttgacctttctgttatcattgcac

SEQ ID NO: 9195 - DNA, 357 bp, Triticum aestivum
  Clone ID: uC-tsrow189059g07b1
actttcaacaactgcaaactgttgagaccgttcatgccagcaaagacttgtcactacagctgaagaaaatgaataagctgcagaatgttaggattgatgacatcaatgcatctcattgtgacgacctttgccaagccctctcagatatgcccctgctttccagcttatttctctctgcatgtgatgacaaggagacactttgtttccaagcactcaagccagtttccaaaaggctccacacactaatcatcagaggcagctggggtgatgaggcactcaagtgcccaatatttcagggtcatgggaagaatctcaagtacctggctctagtttggtgcaatcttgggaatgaagacc

SEQ ID NO: 9196 - DNA, 413 bp, Triticum aestivum
  Clone ID: uC-tsrow189059g08b1
ttcgttcggcaaggtggggataattttgcccagagagctcctgggccatgaggccgatgcatctcttgggggtcacttgcctatggatcctctcatgcgccttgctgctcggcggcgcttgctccgatgggttgctgaggatcaacctgagcaagaagaggctgaacaaggaaaccctaacagccgcgaaatcggcgaggcaggagaccaacctgctgaggcccggcgatggatctcgccactctctcggcctgtcagacgatgacatagttcctctggacaacttccttgacaccgagtacttcggagagatcggcgtcggcacgccgccgcagaacttcacggtcatatttgacaccgggagctcaaacttgtgggttccgtcgtcgaaatgctacttttcgatagcatgc

SEQ ID NO: 9197 - DNA, 331 bp, Triticum aestivum
  Clone ID: uC-tsrow189059g09b1
ttcgtcgcccacgcgtccagagcgaccttggatcagctatattctgcatccatctcgtcatggcagcagcaatgcacccgaggctcgttgccgtggcggcgctggtcgcgctgatgtgcgccgttgctgtgggccaggtacctgccgccggcggtgcgccagtgtgcgacggtgttgatcaggacgtcgtgaatgcgtgcttcaagagctttggagaaggtatgaaaaatgccattgcagacaggcatctttcggggggcaaggtcattaaggttggagtggactgctgcatagcctttggaggccactcctgcctctgcaagatgaagaa

SEQ ID NO: 9198 - DNA, 178 bp, Triticum aestivum
  Clone ID: uC-tsrow189059g12b1
tctgtgtgatactacaccaactatttatttttttctgtttcgaggactcattacacaaccatgttagaaatgagtgtgtattcttcataaaaacgatgcccggtcggcttgtaaagcggaactatttgcgcatctgtagatgattttcctccattgtgcgcatcttcagagagtgaac

SEQ ID NO: 9199 - DNA, 88 bp, Triticum aestivum
  Clone ID: uC-tsrow189059h01b1
tcgtttgcctctggactctgctgttctatcgggtatgttgcattttcttggccatgaacaagctcaaaaagatggctctcatggtgat

SEQ ID NO: 9200 - DNA, 235 bp, Triticum aestivum
  Clone ID: uC-tsrow189059h03b1
gcaggcgagcgatggcgagcgggagtgttccttcggtgctcacgcccccacgcgatgacgccgtcgatctccacaaggccttcaaaggtttcggctgcgacagcacgacggtgaccaacatacttgctcaccgcgactcggcgcagcgcgcgctcatcctgcacgagtacaaagccatgtaccatcaggatctttaccatcgcctagcaaccgagctgagtggaaaccacaagaa

SEQ ID NO: 9201 - DNA, 292 bp, Triticum aestivum
  Clone ID: uC-tsrow189059h04b1
gtgctcacgcccccgcgcgatgactccgtcgttctccacaaggccttcaaagggttcggctgcgacagcacgacggtgaccaacatacttgcttaccgtgactcggcgcagcgcgcgctcatcctgcacgagtacaaagccatgtaccatcaggatctttaccatcgcctagcaaccgagctgagtggaaaccacatgaatgctatgctgctttgggtcctcgaccctgctgggcgtgatgcgaccatactgaaccaagctctaaacgggcgacatcaccgacctgagagcc

SEQ ID NO: 9202 - DNA, 165 bp, Triticum aestivum
  Clone ID: uC-tsrow189059h07b1
tctggactctgctgttctatccggtatgttgcttttatcggccatgaacaagctcaaaaagatggctctcagggtgattgcggagaacctgtccgaggacgagaccgccggcctcaaggagatgttcaagatgatcgactcggacaacagcgggcagatcacgta

SEQ ID NO: 9203 - DNA, 279 bp, Triticum aestivum
  Clone ID: uC-tsrow189059h11b1
tgcgctccctctcgcggcacggccaccaccttacactcacgccgagcggccgagccgtgcccacctcgcccccgtttgactccgacgcgcacgcgcacgcatggatgtgcggcagaggcagaggagggtggcgccgccggcagtgggccatgcgggggcgccccgggtgctgcaggcgggggacgcgctgccgctcccgatccggcacacgaacctcatcttctcggcgctcttcgcggcctcgctcgcctacctgatgcggcggtggcgcgagaagat

SEQ ID NO: 9204 - DNA, 363 bp, Triticum aestivum
  Clone ID: uC-tsrow189059h12b1
tcctcatcttcttgtgcgagagatcacacgttcctttcattcttcaaccaattcgattccatcgatgtcgtctgccctctccttaccggcgacggtgcggccggcatcctccgggcttgggcgccagctctacgggtcgccgccgcgccacggtccagtgctgcgaccgaggaggccgcaggcggagccatgccacggtctgctggcgctgcgaccgaggacgaggcgctgcggcgctttcgggcaggaccactacggtggcgcgctggtggacgagggcatggcggtgctccggcggaggatccgagaggcgcggatggccgtgaccaactacgaggcgccggcgggatgggcggactggga

SEQ ID NO: 9205 - DNA, 362 bp, Triticum aestivum
  Clone ID: uC-tsrow189065a01b1
ctagtttctagatcttgtgtggccgcccttgtctattggttttttgtggtgtttttttgatagtagttccactactttctcggttccaaggttcaattacatattttgcgcgcacatcctgggtgcgcgatttccaccacaaaaaagcttgatgttacaccaccatttcacctatgacatcgtcgttaatcagcgatcacctgaccaccttagaataaaacaatgcacccgaagaacgctatacttcagcaacgtagtatgttcagagctggtgctgatgttgttgctgctgatcattgcttaacattgccgaaaagggtctggagaacggtgttacctaacccggggaccggcgacaggaa

SEQ ID NO: 9206 - DNA, 277 bp, Triticum aestivum
  Clone ID: uC-tsrow189065a02b1
tttttggtttgggcaggccaacatgcggatcctggtgaccggcggagctggcttcatcggctcgcacctcgtcgacaagctcatggagaacgagaagaacgaggtcattgttgctgacaactttttcactgggtcaaatgacaacctgaagaagtggatcggacacccaagatttgaactcatccgtcacgatgtcaccgaaccactgctcgtggaggttgaccaaatctaccaccttgcttgccctgcctcaccaatcttctacaagcacaaccct

SEQ ID NO: 9207 - DNA, 280 bp, Triticum aestivum
  Clone ID: uC-tsrow189065a03b1
gatgtcttgacctgatacctctggaggccccaatattagataatactcataaatgcaaaactggcaaaaatcatagagcaaagcgcgaatatgtagtagctacccacacattgtacctctcagcaggattcagttttattcaatttaatacacagaattcaagctatgtgcatatagttgtgggcttgtggcatgccaccatctgtgatatgtgaatctgagggcaaaacactcgaactgaatcaacaatgcctgaaatgtatacttcttgagctctcaa

SEQ ID NO: 9208 - DNA, 371 bp, Triticum aestivum
  Clone ID: uC-tsrow189065a04b1
tttgtgccctctcttcttcttgctctagcactcttcactaagtctccacggtggatggagggcgtcgtccaggagatcgttatcgtcggcgccgggctcgccggcctcgccacggccctggggttgcacaggaaaggggtgaggtgcgtggtgctggagtcgtcggccacgctgcgggcgtcggggttcgccttcaccacatggaccaacgccttgcgcgcgctggacgccctcggcgtcggggacaagatcagggagcaccatctcctctacgaaaggctggtggctttctctgcatccacaggcgaggctgctgcaaaagtgagcctaaagatgcagggtaaaagcgggcctcacgagatccggtgcgt

SEQ ID NO: 9209 - DNA, 423 bp, Triticum aestivum
  Clone ID: uC-tsrow189065a05b1
tgttttcgcgtgggcgccgccattctcccccttcccccttttctcaccgccgcaggagaagaagcagacgcgcggaggagagcttccaggcggcgaccatggtgaacgttccgaaaaccaagaagacctactgcaagaacaaggagtgcaagaagcacaccctccacaaggtcacacaatataagaagggaaaggacagtctttctgctcaggggaagcgtcgttatgaccgcaagcagtcaggatatggtggccagacaaagcctgttttccacaagaaggccaagacaacaaagaagattgtgctgaagctgcagtgccagagctgcaagcattactcacagcgcgctatcaagaggtgcaagcactttgaaatcggtggagacaagaagggcaagggaacctctcttttctagctgatga

SEQ ID NO: 9210 - DNA, 228 bp, Triticum aestivum
  Clone ID: uC-tsrow189065a06b1
tgtttacgcgtgggcggacgcgtgggcggacgcgtgggctttttatgaattgcagatatcaaaaggcgcatgtagaaggatgttaatgaagtgacaaaagttgcacggctcacaaaatcaaaacttcagcaattgaataaagagaatcttgcaaacagagaaaagccggactttcacaagggatcaggtgtggaccgatctcggacctcagtgacaattacattgact

SEQ ID NO: 9211 - DNA, 307 bp, Triticum aestivum
  Clone ID: uC-tsrow189065a08b1
ttctcgcgattcccaatccccgcacgcctgctctccctcctcctccggccccgtcgccgccgccgcctcgccacaggctcacggttattcaagatggaacacaaggaggcgggttgccagcagccggagggcccaatcctatgcgttaataactgtggcttctttggcagtgcggcgaccatgaacatgtgctccaagtgccacaaggagatggtcatgaagcaggaacaggccaagctggctgcctcctccttcgatagcatcgtcaacggtggcgacggtgggaaagcacctgttgttgcggctg

SEQ ID NO: 9212 - DNA, 255 bp, Triticum aestivum
  Clone ID: uC-tsrow189065a09b1
tctaaagtttaattcacaatgggaatgattgtggctaccaaggcggtcaatatactgtcagagttggaggcaatgctatgaatgctggtctttatgatacacagggttactacaatatgagcatgaatcatccacatcagcctgttcatagatctctgccaaatttaggcgttgattcaggctatggcttaccatcaaatatgtacaacccttgcatgtcaacatctatgaacagatttgtctttcatgctcaga

SEQ ID NO: 9213 - DNA, 208 bp, Triticum aestivum
  Clone ID: uC-tsrow189065a10b1
gtccggccagctactagctggccatggcatcttccaagagtagtcttgcaatgtttgcactggccatagtcatggccggggtggctgacgtgtcggcgcacaacaccccggaggacttcgtcaagctgcacaaccgcgcccgcgccgtggacggcgtcggtcccgtggcatgggacaacaacgtggacaggtttgcgcaggactgggc

SEQ ID NO: 9214 - DNA, 292 bp, Triticum aestivum
  Clone ID: uC-tsrow189065a12b1
cttcgtcaaggagggtgacatgcaaacattgtcacctttgttggaatgtgctctgaagtttcggctcttgtgtacgagtggttacctaagggaaaccttgaagaccgcattctgtgtgccgatgacactccacctgtatcatggcacatccgtacacagatcatccgtgagggttgctgtgcactactcttccttcattcacacaagcctaatgcctcggtccacggcgatctccggccttgcaacattctcatcggtgctgactacagaagcaagctctacaactttggta

SEQ ID NO: 9215 - DNA, 433 bp, Triticum aestivum
  Clone ID: uC-tsrow189065b01b1
tctttacgcgtccgatgactacatgatgcagaacaccatgggcgcgtcccgcgacacccagctccggatgctcagcatcttcaaggccatactggccaacctgcacggcaaggaggacatcttcgccttcgggcacgacgtcatgagagccaaatggcgcaagctcagcgccgtcgtgtcgcgctcccgccggatctcgctgcagaacatccctccgcagtactgcacctacttcgacaagatcagggagccatccccagcttatgcgtgggtcaagtgtgagagggaggaagacagtgactgctccgacgtgctgctcaaggccaagataatcacacggtccggcgtctggaacgacgccagcagccggtacacgaggataagcctcatcaagtcccaggacgacttcgacctgctcctcgagaggatcaca

SEQ ID NO: 9216 - DNA, 387 bp, Triticum aestivum
  Clone ID: uC-tsrow189065b02b1
ttatacccaccgctagcttctctaaggagtgaggagcagagtaatggatcttgaactgttgtggagtggtccacctgcactctcggtactgccatggatctgcggcggcctcgtggcctcggtgctgctctggcaagccgcccggctgctcgaccagctgtggtggcggccgaggcggctggagcgggcgctccgctcccagggcctccgcggcacgcggtaccgcttcctcctcggcgacgtcaacgactacgcccggcagaccaaggaggcgtcgtcgggggccgccgatgccgctgcgctgccacgacgttggcccccgcgccatgccgttcctctacagcaccatcaaggagcacggcacgccgtgcatcttctggttcgggc

SEQ ID NO: 9217 - DNA, 339 bp, Triticum aestivum
  Clone ID: uC-tsrow189065b03b1
tttcttcaccatatgagtacattgtgtgtagacaggggattcctggtttggatggtggtgatgcaccaaagaggaagagtatgctagtcgtgtcagaattcataggttgctcgccatcattgagtggagcaatccgggtgaacccttggaacattgatacaacagcagaggcaatgaacgagtccattgctttgtcagagaatgaaaaccaattgcgccatgagaagcattatcgatatgtcagcacacatgatgttgcctattggtctaagagctatattcatgatctggagagaagctgcagggaccattttaggaggaggtgctggggtattggac

SEQ ID NO: 9218 - DNA, 308 bp, Triticum aestivum
  Clone ID: uC-tsrow189065b04b1
ttgtttagtttcgcctgagccagcaggtcgcgccccaaatgtccatgaaggcgatgcatatgatgggatcttgaaattattttcaagaaaagttcttgctgtaattctcaaagtactctctcttttgcgcttgttcactcgccatgagcaacagttggaaaatgttcatccacatactgcagccgtacccagtaatcaaccaaatcttcagatagttaaggaagaccgagtaaatccttgtctggagcgtcttgaaagacttgaatcgatgtgtaatcaactcagcagaaagcctcctgagatcccac

SEQ ID NO: 9219 - DNA, 322 bp, Triticum aestivum
  Clone ID: uC-tsrow189065b05b1
tgattgtattaagcattcgaccaagccatcgatcgacctcctcgatctgcatttggcatcggtggtcaacttgcattgctcgatcgcgccgacgtctagctcaagcaaccttaagttagcaagctagctaggctcagaaatcttctagggctatagtacacacactttgcactacgtactcacgtgtggtgtgatcacgtcgtcgtcgtcgtcgtcgacatggtcggaagcagccccatgcaggctgtgctggtggcgccgggggtgaagggcaagcaggtgctcccctacaagcgggacgcgctcaaggagaagcacgcca

SEQ ID NO: 9220 - DNA, 424 bp, Triticum aestivum
  Clone ID: uC-tsrow189065b07b1
ttctgctccacgcgtccgcggacgcgtgggcgccggcaacgccgctgctgcgctcatggccaaccttgcgcccaagacaaaggtgcttagggatggtcgatggggcgagcaggaggcatcaatcttggttcctggtgacattgtcagcatcaagctcggtgacatcgtgcctgctgatgctcgtctcctcgagggtgatcctttgaagattgatcagtctggacttacaggagagtctctcccggtgaccaagaaccctggggatgaggtcttttctggatcaacgtgcaagcagggtgagattgaggctgtggtcattgccactggagtacacactttctttggcaaggctgctcatctcgttgacagcaccaaccaagtcgggcactttcagcaggtcctcactgcaatcggaaacttctgc

SEQ ID NO: 9221 - DNA, 373 bp, Triticum aestivum
  Clone ID: uC-tsrow189065b09b1
tttctttcacgcgtccggccagctactagctagccatggcatcttccaagagtagtcttgcaatgtttgcactggccatagtcatggccgtggtggctgacgtctcggcgcagaacaccccgcaggacttcgtcaacctgcacaaccgcgcccgcgccgtggacggcgtcggccccgtggcatgggacaacaacgtggccaggtttgcgcaggactgggcggcgcagcgcgccggcgattgccggctgcagcactccggcgggccgttcggcgagaacatcttctggggttccgggcagtcgtggacggccgccgacgcggtgaagctgtgggtggacgagaagcagaactaccatcttgacagcaacacctg

SEQ ID NO: 9222 - DNA, 170 bp, Triticum aestivum
  Clone ID: uC-tsrow189065b10b1
gaccaagccatcgagcgaccttttcgatctgcatttggcatcggtggtcaacttgcattgctcgatcgcgccgacgtctagctcaagcaaccttaagttagcaagctagctaggctcagaaatcttctagggctatagtacacacactttgcactacgtactcacgtgtg

SEQ ID NO: 9223 - DNA, 313 bp, Triticum aestivum
  Clone ID: uC-tsrow189065b12b1
cgccccgctcaacatgctagatttcgaaagagctctgtacaccatggacattgggcagaacgacatcacttccattctctacctgccctacgacgaggtgctcgcaaagcttccccactttgttgctgaaatcaggaaagccatcgagattctgcataagaacggggcgaggaagttctggatacacgggacaggcgcgctgggatgcctgccggcgaagcttgcgatgccgagggccagcgacggcgacctcgatgagcacgggtgcatcgcaaagttcaacaatgctgccaagaagtcaacacattgctga

SEQ ID NO: 9224 - DNA, 369 bp, Triticum aestivum
  Clone ID: uC-tsrow189065c01b1
tgattttgaattcattgctgatctctgcaaggaaaatgatgtgttgctctttgccgatgaggtctatgacaagttggcgtttgaggcagatcatatatcaatggcttcaattcctggcatgtatgagaggaccgtcaccatgaactctctggggaagacgttctccttaaccggatggaagatcggctgggcgatagcaccaccgcacctgacatggggcgtgaggcaggcacactccttcctcacattcgccacctccacaccaatgcaatcagcagcggcggcagctctgagagcaccagacagctacttcgaggagctgaagagggactacggcgcaaagaaagcactgctggtcgacgggcttaa

SEQ ID NO: 9225 - DNA, 356 bp, Triticum aestivum
  Clone ID: uC-tsrow189065c02b1
tttgtacatgcgcttcagcacccagatcaaggacgaggaaggtaaccccgccttcgccatcgtcaacaaggccactggtctcgccgtcaagcactccctcggccagtcccacccggtgaagctcgtgccattcaacccggagtacctcgacgagtccgtgatgtggacggagagcggcgacgtcggcaagggcttccgctgcattcgcatggtgaacaacattcgactaaactttgacgccctcaacggcgacaaggaccactgcggcgtgcacgacggcaccaccgacgttctctgggagtgggccaagggcgacaaccagagctggaagatcctcccctggggcgaagaggcct

SEQ ID NO: 9226 - DNA, 131 bp, Triticum aestivum
  Clone ID: uC-tsrow189065c03b1
gtgttgtccttgttcctggacggacacattcttcatgtcgacggcggtggcgcggcccttcggcgggttccctggatcggggagggccaagggggatgagctgctcggcaagaagatgagcgacgggttct

SEQ ID NO: 9227 - DNA, 382 bp, Triticum aestivum
  Clone ID: uC-tsrow189065c04b1
tcctattcctgctaccacctcggcaccaccagcccaagcagagccatggcgcccaacggagacaacaccgtggccaacgtccacagcggcatcgacagcaccaacaagacgctgctcaagagcgacgccctctacacctacatcctcgacaccaccgtcttcccccgtgagcacgagtgcatgcgcgacctgcgcctcatcaccgacaagcacccatggggctacatgcagtcgtcgtcggacgaggcacagctgctggggatgctgatcaagatggcgggcgccaagaagacgatcgaggtgggcgtgttcacgggctactcgctgctggccaccgcgctggcgctcccggaggacggcaaggtggtggccatcgacaccg

SEQ ID NO: 9228 - DNA, 339 bp, Triticum aestivum
  Clone ID: uC-tsrow189065c06b1
agccacagagtcacacaggcactagcttcagctagccagcctcagccactccgggcattttcttgcattcacgacggcaatggccaccggtgatgtccacaacccgacggccgcgctgacggaggaggcgcccgcggtggagacaccggtggccgccgaggaggccccgaagacggaggaggtccccgcgcccgcggaggccgaggtcgaggcgtctgcccccgtcgaggctgaggcgaccaaggaggaggcgccgggcgccgctgagacagaggaggccaaggagaccgagccagcagctgctgccgagccggaagccgaggcgcccaaagagccaga

SEQ ID NO: 9229 - DNA, 363 bp, Triticum aestivum
  Clone ID: uC-tsrow189065c08b1
tgcccacgcgtccgcgttccatcatttttaactgttttttttcactggttttttagtcccctccccaccccacaggcagcaaaaaaacacccgaaaagaaaacactcccatcgatccccttccaatcgatccctttgtcgccgccctcgcactcgcgtcaagcgccctcgatccctgcgctacctcccttcgccgccgctgccacagatcccttccccgcttcaggagccgccgatgatcccttccaggagccacgggtatcttctctctcgggacgctgctccgacacgatccggtaaggagacaggcctccgtgtgcggcaacgaaggcggcgagtggcgggcgacggccgacccttcact

SEQ ID NO: 9230 - DNA, 416 bp, Triticum aestivum
  Clone ID: uC-tsrow189065c09b1
tttgtcattggtgctgaaaaatgttcacctctattaagactgagtgaggaacggatgatatcgaggattggagttccatttgaaccttgcaatggcaacaacaagtatgtccaggtaaaaagggaggcgggctcgttgccttcaacaattaccagtgagtgggactctgaaggacatctgtgtaactcagtttgcaatcatgtggagatagctatgcaagctctctgtgctctttatcgccaaaggaagttagcaatgggggatgcaagagaggaatacagggcacatacgttggcggaatttcttttggatggtgatctgcagggaccaatgagaaaaactgttgcggaactagagaatcatgatgcgacaaatccactttttcttatccaagtaacaatcagttgctctgggca

SEQ ID NO: 9231 - DNA, 388 bp, Triticum aestivum
  Clone ID: uC-tsrow189065c10b1
tacacttttctccccggcgccacgtggaccgtgcccgcacggacaggacgccttccacgtacgcgcacggggcttccttccgtgccgcacccgcacataaaacaaaccagaaacaaataagaaaagggtaaagcgggtcggaaggggagaaaagtaagcgccgcgcaccgtaatcggaacggaaatcccccgaatccgtcgccggaatccatccatcgagcgatccatccggccggacggcgaggcgggagcaggaggggagcggtggagatggtgagcgccttcttcctcttctgcgggtgcgtggagcaggccaacgtggcggtggtcgagaagtggggccgtattctccgcctcgccgagccgggcctccacttcttcaacccct

SEQ ID NO: 9232 - DNA, 309 bp, Triticum aestivum
  Clone ID: uC-tsrow189065c11b1
tctttgggctccgctctcctctctctccttcatcctcctccggtttctgatcgcgaccatgggaacccgcggactcgccgtgctgctcctagcggcggtgctgctgcaggccctcctcccggcgtcggaggcggagggcctggtgcggatcgcgctgaagaagcgccacatcgaccggaacagccgcgtcgccgcgagcctctccgaccgcgaggaggggcagcaccacctactcggcggcgccaacaccctccgctccgaggaggagggcgacatcgtgtgcctcaagaactacatgaacgcccagta

SEQ ID NO: 9233 - DNA, 316 bp, Triticum aestivum
  Clone ID: uC-tsrow189065d01b1
tttctaggggagggagcccgaacgaaacgaccaaagcaaagcgaaagagaagagaaatcggccggtcttccctcgctggactaactagcgagtagagagagagagagagcatcagagcaggcgaatcacatcgcagagccaaggcagcagcctcatcgccgccggtggttcgcttcctgccgccccaccaagccccgaatcaaagccggggctgcgcctccctccctgctattggtgttggtttatcgcgcggctggccgggggcgctgtcgtgtgctgcggagaggaggaccggagggggcggagcatggacgga

SEQ ID NO: 9234 - DNA, 396 bp, Triticum aestivum
  Clone ID: uC-tsrow189065d02b1
ttctttagccagctacctgctccttaattctctcttcttgccctactcccatcccgtggctagaagccaagaatttgtctgccatggcgtcggagccggtgatcgggaagctcagcgtccgcgttgtccgaggccacaacctcgtcatcgccgacccgctcacccacaccagcgacccctatgtcgtcctctgctacggctcccagaaggtgaagactagcgttcagaagaaaaatgccaatcccttatggaatgacgtactggtgctccctgtcacaaatcctacaaagccagtgaaacttgaggtttttgatgaggacaaattcacagcggatgacagcatgggagtggctgagttcaacgtaactgatacctatgacgctgcaaagctggatc

SEQ ID NO: 9235 - DNA, 408 bp, Triticum aestivum
  Clone ID: uC-tsrow189065d03b1
ttgtttattcctcctaccacctcggcaccaccagcccaagctgagccatggcgcccaacggagacaacaccgtggccaacgtccacagcggcatcgacagcaccaacaagacgctgctcaagagcgacgccctctacacctacatcctcgacaccaccgtcttcccccgtgagcacgagtgcatgcgcgacctgcgcctcatcaccgacaagcacccatggggctacatgcagtcgtcgtcggacgaggcacagctgctggggatgctgatcaagatggcgggcgccaagaagacgatcgaggtgggcgtgttcacgggctactcgctgctggccaccgcgctggcgctcccggaggacggcaaggtggtggccatcgacaccgaccgcgagtgctacgaggtgggcc

SEQ ID NO: 9236 - DNA, 348 bp, Triticum aestivum
  Clone ID: uC-tsrow189065d04b1
gctccacgaccagaggagccgacacccaacccagtaccaacgcgctccgagcacaccaagacaacatgcgtccatctcaggaccttcggctggccgagctcctcctgttgtcagcctccgtcctcctccccacagccagagcccagcaggaataccgggaggaggaggagttcagctactcgctggacgcagagaatgggccggcgcactggggcgacatcaaggaggagtggtccgcgtgcggcaagggcaacatgcagtcgcccatcgaccatcgcagcccgcgcgtctccctcgtgcgcggtctcggctacctcaaccactcctacgccccagccaacgccacca

SEQ ID NO: 9237 - DNA, 386 bp, Triticum aestivum
  Clone ID: uC-tsrow189065d07b1
actggacgcgtgggcggacgcgtgggcgagctcctccgattccgcccgcctccgttcctccgcatcttcccggccgccgccaagatgaagctcgtcaggttcttgatgaagctgaacaacgagacggtcaccatcgagctcaagaacggcactaccgtccacggcaccatcaccggtgttgacataagcatgaatactcatctgaggaccgtaaagctcacaatgaaagggaagaatcctgtaacccttgatcacatcagtgtgagaggaaacaacattcggtactacatgctacctgatagcttaaacctggaaacgttgctggttgaggatacccccagggtcaagtctaagaagccaactacagggaagcctatgggtcgggg

SEQ ID NO: 9238 - DNA, 219 bp, Triticum aestivum
  Clone ID: uC-tsrow189065d08b1
tttttctattgatgatatatggtccatatcggaatggaacattatcaagtgtgctttgctagagaataactgttctagcagagttataactactacacgcattattgaagttgcacggtcatgttgtatgggtcaagatgaccgcatgtatgaaatgcaaccctagagtgattttaattgtaaaagattgttcttgagaacaatttttgggtccaagga

SEQ ID NO: 9239 - DNA, 270 bp, Triticum aestivum
  Clone ID: uC-tsrow189065d09b1
atcgtctacgtcgtcatagtggccacggtcgccttgtatactcctcggatttgtgttctggggagcatattcatttttacagtggaccgatgatatgataatactttactgcccctcttttgtttccttgttttgagaatattggttggttaaattgtgttgtagttcctgattacagtgaggaaagaagaaaaagggtggcatccccttgcccccgatgttgtaatgtagaaaaagaatgacttgtcagtaacaatgtgaagtattttt

SEQ ID NO: 9240 - DNA, 373 bp, Triticum aestivum
  Clone ID: uC-tsrow189065d10b1
tttaccgactgctcgcacccctcgcatgaagacagactgggacgagtcggtgatccagcctccgtggcatggttcaaacagcccttgcgtggtgaactccaccccgccaagccccgggcgtcaaatggttcctgacccggcatggctggccggcatccagatctcgtcaacgagcccttcatcgcccacattcagtctcatgtcctccaacccattcagcgtcttcaaagaagccatccctggcggcggttcatcaaggatgtgcacgccggggcagagcggcacgtgctcgccggtgatccctggcatggcgcggcacccggacgttcacatgatggacgtggtctccgacgagttcgcgtttggaagcagc

SEQ ID NO: 9241 - DNA, 297 bp, Triticum aestivum
  Clone ID: uC-tsrow189065d11b1
ttctcttgacgagatccatccaccctagaggccaagaagagaagggaggagagagagaggccggcggcggcggcggagcaggcgatcggagatggtgcggaaggccaaggtcgagttcgacgagaggccgtcggatgacttcgacccgaagaacccgtacggggacccggtggcgatgctggagtacagggagcacctggtgcgggagaagtggatccagatcgagaccgccaagatcatccgcgaccgccttcgctggtgctaccggatcgagggcgtcaaccaccaccagaagtg

SEQ ID NO: 9242 - DNA, 352 bp, Triticum aestivum
  Clone ID: uC-tsrow189065d12b1
ttgacgagatccatccaccctagaggccaagaagagatgggaggagagagagaggccggcggcggcggcggagcaggcgatcggagatggtgcggaaggccaaggtcgagttcgacgagaggccgccggatgacttcgacccgaagaacccgtacggggacccggtggcgatgctggagtacagggagcacctggtgcgggagaagtggatccagatcgagaccgtcaagatcatccgcgaccgcctccgctggtgctaccggatcgagggcgtcaaccaccaccagaagtgccgtcacctcgtcgaccagtacctctagttcacccgcggcgtcgggtggggcaaggacca

SEQ ID NO: 9243 - DNA, 345 bp, Triticum aestivum
  Clone ID: uC-tsrow189065e05b1
tttgtattctaccactagaccgaccgcaccaggtgaagtgggagctttgcgctaagggctcattagcaaccatgaagagcaccaagctcgcggcgatcctgatcctccaggccgtcctggtcatggggatcctctcacacgtgaacgccgactatttccccaagtgctgcaacagttgcaggtccttctcgggggtcgacgtctgcgacgacgcccacccccagtgccccaagggctgctcggcctgccgcgtggtgacgcccagccctcacaagacgttccggtgcgccgacatgaagagcaccgtcgacggcacctgcggcgggccatgcaaaaagcactgat

SEQ ID NO: 9244 - DNA, 414 bp, Triticum aestivum
  Clone ID: uC-tsrow189065e06b1
tttgtatgagcagatgctggtgtacgagtacatgccaaatggtactctacgtgatcatctttcagctaaagctagagagtctccaagttttcccatgaggctacgaatcgcactgggatcatcacggggcatcctgtatctgcacacggaagccgaccctccgatattccatcgcgacatcaaggccagcaacatcttactggactccaagtttgtagccaaggttgctgatttcggcctgtcgcggctggctccgctgccagacacagaggggagcgcccctggccacgtgtccaccgtcgtcaagggcactccaggttatcttgacccggagtatttcctgacgcacaagctgacggacaagagcgacgtgtacagcctgggcgtggtgttcctggagttgcttacagggat

SEQ ID NO: 9245 - DNA, 239 bp, Triticum aestivum
  Clone ID: uC-tsrow189065e08b1
tactgcggacgcgtgggtccttcctccccgccgccgccgcctctcccaccagcgcacgatggaccagacgccgcagcgccgccgccggagacgcgccgaggtcgccccctccgacggcgctccgggcgcggcggagtacagcctcgacgagccgaccttggcggagaagctcgcggccctgagcccgcccgccgaggcggccggtggcgccgccgtggtgccctccagcgcggactccg

SEQ ID NO: 9246 - DNA, 225 bp, Triticum aestivum
  Clone ID: uC-tsrow189065e09b1
agagaggactatgagaagaggatcctcacttccctcaatggacggcagctgacccgagatggccggatgaggaatcctgatgagaagcccatatttattgaaacacagcagccagcagcacctgtgcaacaggagcctatcccatcaaaagcgcccttgaaacaagcaaaggaagctgctgctcctcaagtcgtcgctcccaaagaagagccccttgcaaaagca

SEQ ID NO: 9247 - DNA, 272 bp, Triticum aestivum
  Clone ID: uC-tsrow189065e10b1
tgttcggtacgacagccatcatcctccgtgcggttccaagctccaactcccacgcccgtcttcccctagatcaggaggagcacgccgcaccggagcgccgagacctcgaagccttcgtctccacctcggagcagagatggggctcacgttcaccaagctgttcagccgcctcttcgccaagaaggagatgaggattctcatggttggtctcgatgcccctggtaagaccaccatcctgtacaagctcaagctcggagagatcgtcaccacca

SEQ ID NO: 9248 - DNA, 279 bp, Triticum aestivum
  Clone ID: uC-tsrow189065e11b1
ttctggtctgcgtctcctcctcctttccccaacccagaccaggagcgccctctctcccccgtcccctccccccaggaaaccagccatgaagggggccaaatccaagggcgccgccaaggccgacgccaagttggcggtgaagagcaagggggcggtgaagccggccgccaaggggaagaagggcaaggccggcaaggaccccaacaagcccaagagggcgccatccgccttcttcgtcttcatgggcgagttccgcgaggagttcaagcagaagaaccc

SEQ ID NO: 9249 - DNA, 255 bp, Triticum aestivum
  unsure (1)..(255): unsure at all n locations
  Clone ID: uC-tsrow189065e12b1
nctggacgcgtggcaaaaactgtgatacagataaggagccatgcacagaagtactttttgaaggttcagaagaacggtacaggcgaacatttaccttcgtctcggccgaagcgtaaggtagcccatccatatccgcagaaggcctctaaaactgcccctgtagcatcccaagctgttttaccacaacaacctgctcctgctgcccctcctacgagggatcaagatggtgttaatgtgtctatggaggcatctatg

SEQ ID NO: 9250 - DNA, 321 bp, Triticum aestivum
  Clone ID: uC-tsrow189065f03b1
ttcgtttgcgtccgggggagtgctgggggatctccacagtgccgtctagctgaaggcctgtttgcagaagacctgctaggccaggtacctggattagatgctgaggatccatgggtggtgcccgaggttccctccccaccaacagcctcgggtctatgctggcaagggaacttgcattaccctgtgtatgacggcgccatgttcgtccctgaagcaccctccctgcagagctcccaggaccacttcactgcatctgctggtttcaagcgttcaaggagagagttttgaatacccgaaagaatatagcgttggacatatctg

SEQ ID NO: 9251 - DNA, 411 bp, Triticum aestivum
  unsure (1)..(411): unsure at all n locations
  Clone ID: uC-tsrow189065f04b1
ttggtanggaagtacgcaaatgataatggattagaaataattacaataaacccaacaatggtcatcggtcccctgttgcagcctacactgaatactagcacagaagcaatattgaagtttataaatggattatcttctacatacgccaatttctgctttggatggataaacgttaaagatgttgccctggcacatatccttgcatatgaagttccttcagcaaacggaagatattgtatggttgaaagagtcattcaccactcggaccttgtcaagatcattcacgagatgtatcctgaatttccagtgccagacaagtgtgcagatgatgcgccgtttgccccaatctaccaggtatcaaaggacaagataagaagtctgggcatggagctgacacccctggagacgagc

SEQ ID NO: 9252 - DNA, 355 bp, Triticum aestivum
  Clone ID: uC-tsrow189065f05b1
ttgttttcgcgttctcctctgtggcacgcaacctttgtcccctctagatatagaacaacacgcctcgtccacccatacctctagaagtctagatctaggcctgacccgtagttttctgatcgtgttcgcttcgatctcggggtaagctgagttcggcgtccatgatttgttcctatcacccgtttgttatctgattctcaggtttctccttctgatcggcgagttggggcttgcggcgatcttggagcatagacgggaggcaagctggatctgcgcacggaagcttccgatctgaccggctggcgtctcagatctgctgctggtctgatgctaaacggcggatctagatgttccc

SEQ ID NO: 9253 - DNA, 460 bp, Triticum aestivum
  Clone ID: uC-tsrow189065f06b1
tttgtccacgacgtcgccggccgcttcgccggcaagctggacatcctcgtacgtgaagcaccccatatcttctccccagtcccggacgcgtccgccccgacgaccgaccgacgaacagcgcaaaagtaggagggagaggatgagcaccatggcgatgtcggcgctgaacccggacgcgcccatgttcatcccggcggcgttcaagaaggtggaggactactcgcccgagtggtgggagctcgtcaagaccaccgcctggttccgcgaccactggttccgccagcaccaactctacgaggacctcgccgacaacgtggacgtggacgacgtcgccgccctcctccccgacgactccgtcgacctgctcgacgccgacgacctcttttactccccgccgtcgccccagccccagcccgacttctaccactacaaaccagcagggttcggcggtgacatggac

SEQ ID NO: 9254 - DNA, 300 bp, Triticum aestivum
  Clone ID: uC-tsrow189065f07b1
tcttttgtagcgggaggccctgacggggagaaggggctcctctccaacatcatgcatggtgttgccggtgctcatggtggtggccatggctacccatctggtggccacgggtaccccccgcagcagcatggataccctcagcaaggctaccctcctcagcatggctacccaccgcagcagcatggctaccctccacagcagcatggctacccccctgctggctaccctggctcatctggtcacagtggtagccatggaggaggaggcatgggcatgggtggcatgctggctggaggagca

SEQ ID NO: 9255 - DNA, 292 bp, Triticum aestivum
  Clone ID: uC-tsrow189065f08b1
tttttctccacgcgtccgcccacgcgtccggactcgcagcatcagcagccggcggagatcgtatcatggcgatggagggctacgaccgcgagttctggcagttcggcgaccagctgcggctccagacggccagcttctccggcctctccctcggcgactccatctggtcccccgccgacgccgccccccgcgcccgcaacgccgacctcttctcccccttcccggcgcccgacaacaacaacgccgtcaagatgaacggcaacggcctcaacgggcccggccttatcgggtc

SEQ ID NO: 9256 - DNA, 430 bp, Triticum aestivum
  Clone ID: uC-tsrow189065f09b1
tgttctgaaggttcagggcggtatacctggtcagatggtactatttatgatggcgagtggaggacggggatgaggcatgggcaaggaaagacgctgtggccttccggagccagctatgagggcgagtatgccggtgggtacatatatggtgaaggcacgtacactggacaggataacatcgtctacaagggacggtggaagctgaaccgtaagcatggtctcggatgccagacatatcctaatggggacatgttccaaggttcttggattcagggagaaatacaaggtcacgggaaatacacatgggaaaatggaaacacgtacaccggcaatatgaaaaatggcaagatgtccggaaagggaacatttacttggaaaaatggtgattcgtacgaaggcaactggttagatggcatgatgcatgggtatg

SEQ ID NO: 9257 - DNA, 116 bp, Triticum aestivum
  Clone ID: uC-tsrow189065f11b1
gctcaaaccccacacccgcacccaagaaagcaagcagagcatcccccatccccccgttccactttccccttcctcgtcatggcaacgaaggcccccgccgtcgcggcgctcctact

SEQ ID NO: 9258 - DNA, 204 bp, Triticum aestivum
  Clone ID: uC-tsrow189065g01b1
tcgtcctcgcgtccggccgcaacctgccgcaaaggcggcgtttttcctgcccttgcgacctgcccaggccgcagcagagcgccatgtggtcctcccctaccctcgcgccagacgccggggccgccgtgagggccgccgacgactcgtcggagaccgaccagctcgactccatgtccacggaggacatcgtccgggccacccgcc

SEQ ID NO: 9259 - DNA, 321 bp, Triticum aestivum
  Clone ID: uC-tsrow189065g03b1
ttctgatgttacaaccactgggcaggctgtcaccgccctcatgatgctcagggtgaacaaggtccagtcagacctggcgatcagcgatgtctacatgccggacatggatggtttcaagctcctggagcttgtgagtctggatatggacctaccagtcattactaaggctaacctgcttaatcctctgctgctctttgtaaacgatgctctaaaaggtatcactgccggggaatgattgtcgagtgaatctactcgtttcatgtcatgtcattaggtgctacagaactttggagatgaattatgtctgctaacctacaaaca

SEQ ID NO: 9260 - DNA, 365 bp, Triticum aestivum
  Clone ID: uC-tsrow189065g04b1
tttgttctaagggaatgaaagaattgtcataaccgagtttgtgtcaaatggcactcttagggaacatttggatggacaacatgggctaatattgggcttcagtcagcggcttgaaatagccatagatgttgcccatggattgacttatctgcatctatatgcagagaagcccattatacaccgggatgtgaagtcatcaaacattctactaactgaaggcttcagggcaaaagtagccgacttcggatttgcaagaattggttcaacagatccaggccagtcagagattcaaactgatgtgaaaggaacagctggctatgtggatccagagtatctgcggacaaactatctgacagtcaagagtg

SEQ ID NO: 9261 - DNA, 336 bp, Triticum aestivum
  Clone ID: uC-tsrow189065g06b1
acgagtgaagtgagagcttcgcacgaaatgttcatcagcgaccatgaagggcaccaagctcgcggcgatcctcatcctacaggccgctctggtcatgggagtcctctcacacgtgaacgccgactatttgcccaagtgctgaaacaactgcaggtccttctccggggtcgacgtgtgcgacgacgcccaccccaagtgccccacgggctgctcggcgtgccgagtggtgtcaacgagccctgaaatgtggcgctgcgcggatatgaaatccaccggcgacggcacctgcggtgggccctgcaagaagtactgatcggctcatgccagcatgatatg

SEQ ID NO: 9262 - DNA, 424 bp, Triticum aestivum
  Clone ID: uC-tsrow189065g08b1
tttctgctgaacgttcaaagatgctgcacaagagtgcagaatgatattggatatcgtggaagcagcagtacctgaaggcttaccagcaggctttggaaaaggttgtaaattgaacgaaataatatgcaaggccgtagagtttctccctgagttatggaaattagcagggttttcgcttgaagccatttctgaatataggaggtctcttctcaataactggaatcttgatggagagaccatagctaaaatacaaaaggaatttgctgtttttcttctgtacagtggctgtgaagcccgccctccaaatctccattctcagttggatggttcatttgtaccacgcaacaatatggaagaggctacactccttttaatgattctattgagaaagtttaatctgaggagggttgagcgggatcccact

SEQ ID NO: 9263 - DNA, 397 bp, Triticum aestivum
  Clone ID: uC-tsrow189065g09b1
tttctgatgttacaaccactgggcaggcagccaccgccctcaggatgctcagggagaacaaggaccagtttgacctcgtgatcagcgatgtccacatgccggacatggatggtttcaagctcctcgagcttgtcggtctggagatggacctcccagtcattagtaaggctaacctgcttaatcctctgctgctctttgtaaacgatgctctaaaaggtatcactgccggggaatgattgtcgagtgaatctacttgtttcatttcatgtcatttggtgctccagaactttggagatgaattatgtctgctaacctacaaacatcgcaaatagttcctcgatgtgctactgctagttttgttagggaagatggaaaatctttgttcatttgtgtggtt

SEQ ID NO: 9264 - DNA, 401 bp, Triticum aestivum
  Clone ID: uC-tsrow189065g10b1
gctccacgcgtccgccacgcgtccggtttcctgcgccatggagatgaccaagctctctggtatctccgacatcattcccgagatggaggtctgtgacttcgacttcgagccctgcggctactccatgaacgccatcaacggatctgccgtctccaccatccatgtgacccccgaggacggcttcagctatgcgagctacgaggtcatgggcatggacgcctccgccctggcctacggcgacatcgtcaagagggtcctccggtgctttggcccttcagagttctctgcggcggtcaccatctttggtggccgcggccacgccgccacctggggcaagaagctcgacgccgaggcatacgactgcaacaacgttgtggagcaggagctcccctgtggaggcg

SEQ ID NO: 9265 - DNA, 351 bp, Triticum aestivum
  Clone ID: uC-tsrow189065g12b1
gcaaagaaaatggcttccacggaaaccactggcagcagcaagaagctgcgcgtgctcctcatccctttcttcgcctccagccacatcggacccttcaccgagctcgccgttagccttgcgacggccagaccacaggccgtagaggccaccatcgcggtgacgccggcgaacgtgccgttcgtccggtcgttgctccagccgcacgagaacggcagtggcataccggtgaaggtggcgacgtacccgttcccggccgtggacggcctccccaagggcgtcgagaacctcggtgcggcagcgcacgccgacgcatggcgcatcgacgtggctgcgctgagcgattcattgatg

SEQ ID NO: 9266 - DNA, 165 bp, Triticum aestivum
  unsure (1)..(165): unsure at all n locations
  Clone ID: uC-tsrow189065h01b1
gttctttcacgacgttngcgacgctggagtgggggatgacggagctggtgcgccacccgcgcatcctgcaaaaggcgcaggaggaggtacggtgggtggtgggcggcaagggccgggtggaggagtcggacctggcggagctccactacatgcgcgccatcatca

SEQ ID NO: 9267 - DNA, 312 bp, Triticum aestivum
  unsure (1)..(312): unsure at all n locations
  Clone ID: uC-tsrow189065h02b1
atangtccacgaccaatgtgttacaaggcttatggaagcggaaaagaagatactcctgctctgtgatgttcctgggtttgaaaacactaggatgaagctgctgagacatgtttcctttgttgattgcccgggctcacgacattctcatggctacaatgcttaatggagcagctatcatggatggagccttgcttttgatagcagcaaatgaaagctgcccacaaccccagacatctgagcatcttgcagctgctgagatcatgcgtctccaacatctcataattttacagaataagattgatcttatccagg

SEQ ID NO: 9268 - DNA, 510 bp, Triticum aestivum
  Clone ID: uC-tsrow189065h05b1
tactcgtggaaaggcaatccacggtggaaacttccagggcacgcccatcggtgtgtccatggacaacacgaggcttgccattgctgcgattggcaagctcatgtttgcccagttctcggagctagtaaacgacttctacaacaatggcttgccctccaacctctctggtggccgcaatccaagtcttgactatggcttcaagggtgccgagatcgcaatggcgtcatactgctcggagctccaattcttgggcaaccctgtgaccaaccatgtccagagtgcggaacagcacaaccaagatgttaactccctcggattaatctcagcccgtaagactgccgaggccatcgacattctgaagctcatgtcctctacatttttggttgcgctgtgccaagccatcgacctgcgccacctcgaagaaaatgtcaagaatgccgtcaagaattgtgtcacaagagtggctaggaagaccctgttcacacatgacatgggtggccttcacaacgc

SEQ ID NO: 9269 - DNA, 405 bp, Triticum aestivum
  Clone ID: uC-tsrow189065h06b1
gcgtcctctcgtccgccacgcgtccgccacttgagatggacttaattcttccagtttccgagtgccgagatagtttggagcaactactggagagcatcccgagcatgtttgaaaacaatagggttgctgattcagcgtttggagcagctatgaaggcaggtttcctagcaatgaagcccactggtggaaagttgcttgtgtttcagtcggtgctgccatcagttgggactggttcattatctgcaagggaaactgaaggtagatcaaatatttcgagtggagataaggaagcacataagctcctgcagcctgttgataagacactcaaaacaatggcactagaatttgctgagtatcaagtttgtgtagatgtgttccttaccacacagtcatacacagatgttg

SEQ ID NO: 9270 - DNA, 279 bp, Triticum aestivum
  Clone ID: uC-tsrow189065h09b1
ttctgtccacgcgtccggcgcagttcctcacggccgtcggcgagatggcgcgggggctcccggagccgtcggtcaagccgatctggtcccgcgacgccatccccaacccgcccaagccgccgctcggcccgccgccgtccttcacggccttcaacttcgtcaagtccaccgtcgagatctcgctggacagcatcaagcgcgtcaaggaccaggtcgccgccgagacggcccagcgatgctccaccttcgacgtggtgaccgccatcatcttcaagtgcc

SEQ ID NO: 9271 - DNA, 205 bp, Triticum aestivum
  Clone ID: uC-tsrow189065h10b1
acacacgcacacactcacacacaccctgccgatcttgcatttgctctgagaaatcggagaggaatcctacaccggcgagaaagaagctacgagcagagagagatggaggccgtgcatgagggcaatggaggagggagcggtctggtggtgacggagctgagccacagtaaggagctggtgaagcagctggacgtgcacctggggg

SEQ ID NO: 9272 - DNA, 371 bp, Triticum aestivum
  Clone ID: uC-tsrow189067a02b1
tctccgctccattcgattcgatctcggcttcctctccaagccacgcgacgcgagaccagagctccggccatggcggcgacgatccagtccgtgaaggcccgccagatcttcgacagccgcggcaaccccaccgtcgaggttgatgtgtgctgctcagatggaacctttgccagggccgccgttcccagcggtgcatcgactggtgtctatgaagctttggagctgagggacggtggatctgactacttgggcaagggtgtttccaaggctgttaacaatgtgaactccattattgcacccgctttggtcggcaaggaccctaccgctcaaactgagctcgacaactttatggttcagcagcttgatggaac

SEQ ID NO: 9273 - DNA, 345 bp, Triticum aestivum
  Clone ID: uC-tsrow189067a03b1
tgtcacttctcccgtcccgtcccgtccccagccaaccttccatctccgtctcgcgtcgcggcggcagttccactccctcgccatgggcaagattaagatcggaatcaacggttccggacggatcgggaggctcgtcgccagggtagccctccagagcgacgatgtctagctcgtggccgtcaacgaccccttcatcaccaccgagtacatgacctacatgttcaagtacgacaccgttcacggccactggaagcacagtgacatcaagctcaaggacgacaagactctgctctttggcgagaagccagttaccgtcttcagcgtcaggaaccctgaggagatccc

SEQ ID NO: 9274 - DNA, 195 bp, Triticum aestivum
  Clone ID: uC-tsrow189067a05b1
attacatgcaacctctaccatggtttggctcggatcttgaccaagactttcacatctgagttccctcatgttgagaggtcactctctggaccatggttaaccagcctaacttcaagagggtcattggtgatttcaagcaggcagaggttgaccctcctgttcagaagaaggctgctcctgctaaaccaaaggagg

SEQ ID NO: 9275 - DNA, 162 bp, Triticum aestivum
  Clone ID: uC-tsrow189067a06b1
ttgttgccgccgccagccatcctccccatggaccactttccccgcccgtcccgctcgccgtggccttcgccgatgaccgcggccctgcgcaggacagtgccgagctcgtgagaatgagaggagaggagccgccacccaacccaacccacacaaccaaggagc

SEQ ID NO: 9276 - DNA, 371 bp, Triticum aestivum
  Clone ID: uC-tsrow189067a09b1
ttttgcacgctcaaaaaccttcatttgagcaacatcgtgtttcaccagctgctacgaaaagaactggcccagtggcttctaggatgcacacgcaggcatcagctcagccaaaagcagaactaccagttcccaaggttgctatacctcctcaggcagcaaaatctcctgctaaagttgatgtgacacccgcaaaagttcatcagtcatcggttgcaccccctcctaaagtcgactatgccattgacctctttaacatgttatggatggacggaacaactgagaaagaaccagtgtcatcttccaatgatgataatgcttgggatggcttccagtctgcagaaccagcacctaactccgagaaaaaggatact

SEQ ID NO: 9277 - DNA, 328 bp, Triticum aestivum
  Clone ID: uC-tsrow189067a12b1
tttgacttctccgggacggcgcgtatgtggctccaaccccttcgccaaatccatcgcccaatccgagccccaagccctcgccgtcgggaggcgggaagtggtgcgtcgccaaggacggcgccaacgggacggacctgcagaacaacatcaactatgcctgcggcttcgtagactgcaagcccatacagagcggcggcgcgtgcttcagccccaacagcttgcagtctcatgcctcgcacgtgatgaacgcctactaccaggccaacggccacaccgacttggcgtgcgactctaagggcaccggcgtcgtcacctccagcgaccccag

SEQ ID NO: 9278 - DNA, 234 bp, Triticum aestivum
  Clone ID: uC-tsrow189067b01b1
ttgctcacgcgtacggagagctccagccatggggcacgtcaacttctaccgcaactatggtaagacattcaagaaaccaaggcgtccttatgagaaggagcgtcttgatgcagaactgaagctggttggtgagtatggattgaggtgcaagcgtgagctctggagggttcagtatgcatagagcaggatccgtaatgctgcaagacacttgctcacactggatgagaagaatcc

SEQ ID NO: 9279 - DNA, 287 bp, Triticum aestivum
  Clone ID: uC-tsrow189067b03b1
tctcacgcgtccgctggaattgctctgaagatcttccttatactactcccaagcatattaatgtttatgtcaaaggttgaaggattgacatcagtgtcttcattggaaagaagatctgcatcgaagcactatatcttcttattctttaatgtattcctggcaagcatcattgctggatctgctttggagcagctacaaacctatcttcaccagtcagcaaatcaaataccaaggacaattggtgtagcaattgcaatgaaggcaacctttttcataacgtatgtaat

SEQ ID NO: 9280 - DNA, 306 bp, Triticum aestivum
  Clone ID: uC-tsrow189067b04b1
ttcgtttagacaccaagccatcacccagctagagaggagctctcaccgcatagttcagacagcagccacagaccacagtcggtcaggtctcatcccaggcctcagctcaatcagcaggagtaggaacgcccactagcactggatgcgagacaggggtacatgattcggttcgacggtcacttcgagttcgaggacccgtcgaccgtcgagccgacgccgcctccgttcgcggtcagggcgatctcgtctgagcaggagcatacgcccatggtcgccgggctgctgcacgtgatctcagggtacacc

SEQ ID NO: 9281 - DNA, 335 bp, Triticum aestivum
  Clone ID: uC-tsrow189067b07b1
tactacgccgctcggcaccctagtagacaacaaacaagcggggcaagaacatggcgatcgcgatctcgcaggaggccttcgatgacatggtccggcagaacatggaggacctcggaatggaccccgacgaggacctcgccgacgccgttgacgccctcaccctacagggcgccaacctctccgggatcatcaggcgcgtacctggggacgccgcggcggaggaggtgaatccggtgatgcggttgctggacgagctgaaggcctcctccagcggccggtcggcggaggatcttgacaggctggtctctttgctcgacgagttgctcgagctgtgc

SEQ ID NO: 9282 - DNA, 409 bp, Triticum aestivum
  Clone ID: uC-tsrow189067b10b1
ggccagttggttgtgcctgccacaagtcagacctcgtcgtcgactcatcctgtgacactatcgtccaccactgctgcaagtattatgccaagagctgatcctcaagcacgtaaggcatcccttgcccgattcttggagaaaaggaaagaaagagtgacgactacggcgccatatccatcagccaagagcccgatggagagcagcgacacggtcggaagcgccaacgacaacaacagcaagtcctcgtcgtgcacggagatcgccttctcaagcaaccatgaagagtcgctgcgcctaggccggcccaggaacatcagctttagtggggagtcctcgagtacaaaactacacatctgatccgatatgatcttccggtgtccatagatacaaccatgatggctgatgcaaa

SEQ ID NO: 9283 - DNA, 161 bp, Triticum aestivum
  Clone ID: uC-tsrow189067b11b1
tttccacaacacactcccttggcctcctcctccgcacctcattcacaccacccccaactcacgatcgatcgctagcctcgccggagcatgaggggttcacggtggtgctgctgctgcttcggccggggcggcagcagggccactcggtcggggcgcgtggg

SEQ ID NO: 9284 - DNA, 416 bp, Triticum aestivum
  Clone ID: uC-tsrow189067b12b1
tatcgcatcgcatcgcccgcccacacctccctcgccggtacccactgtagcatacacatccatccatacctacctctagagtttttctcttctgttctgtcctgttctatacaccaaggagaaggaaaataacgagccgccattgccgcacctctgcgcttctggacgaggaggccggtgcaacgcaatgcggcatcttactactactacgtactttatagtcactacaaaacacagttactgtgctggtaacaggaaggaagggtttgagtgttgtgtctccccggaacggcgggaggtagtagccgtagttattactcttgtggtagctagcggtactaagttttgcaactttgttgttcttattaggtgtgtttgatatggtagatgtacatatatgtatactatcacagatg

SEQ ID NO: 9285 - DNA, 236 bp, Triticum aestivum
  Clone ID: uC-tsrow189067c01b1
aagccgctggccagtggccatggagtgcggccagtgcagcgcgcgcttggctgtcacgcggggcgcgagctccattcactgcgcgcactggcggagggcgactctcgtcgaacggcacggcgccgtcgtgcacggggccgccggcttcgtcaggagcgtgttcacgaacattggccggacgaggccgcacccggagtacccgccggtgcacggcaacaagcgcgctctcttggtcg

SEQ ID NO: 9286 - DNA, 75 bp, Triticum aestivum
  Clone ID: uC-tsrow189067c02b1
ttgtcggctacacttccctgacagacattgttaggccttgtcagggaagctagctaggtaagaaaaaccatggcc

SEQ ID NO: 9287 - DNA, 279 bp, Triticum aestivum
  Clone ID: uC-tsrow189067c04b1
tttctgtatgcactcacagtggtcggaccaagccaaacctcccttggcattaaagctgccaatggtgtacttatcgccacccagaagaaactgccttctatttagtggacgaaacatctgtgcaaaagattcagtcgttaactccaaatataggagtctgatacagtgggatgggtaccagattttcaaggtcttgtcaaaaaaagtcagaagcaggcacatcagtattatcggttgtgcaaggaaaccatacctgttacccagcttgtccgagagact

SEQ ID NO: 9288 - DNA, 261 bp, Triticum aestivum
  Clone ID: uC-tsrow189067c05b1
tttcttgatcgagccatccgcatagcccacaccctcgatcgtcttgcctttcgtgcctcggttccacacaactgccagggcctgctgctgaaacctgcttgttattcttcttcattcttcgccgtggcctagcatgctgtggatctatccaacggggggagatcgaccagatgactggctgcaacggcaacggcaacggcaacttgcgcgtattcaccatgggacagcagacggtcactgagaagaagctcggaggaattg

SEQ ID NO: 9289 - DNA, 343 bp, Triticum aestivum
  Clone ID: uC-tsrow189067c06b1
cccacgcgtccgtgccccccgagccgcacgccccaaccacccctaaccctagatcccgccacactcaccccgcacacgcactctcactctcccactccgcctgcttgtcagttgtcactatggaggccgggagcagcaaggccaggctggcggtggcgtgcgcgatcggcggaatcttgctgggcgcggccgacgtggcgctccacgttgccgggcccgtggccgtcccgggcctgcccccgctcgacgcgctgcgccgccggttccgccgtcggcgccgacccgtgcgcgtctacatggacggctgcttcgacatgacgcactacggccactgcaacgcgct

SEQ ID NO: 9290 - DNA, 69 bp, Triticum aestivum
  Clone ID: uC-tsrow189067c08b1
tttgctacactaccctgactgacattgttaggtcttgtcagggaagctagctaggtaagaaaaaccatg

SEQ ID NO: 9291 - DNA, 411 bp, Triticum aestivum
  Clone ID: uC-tsrow189067c10b1
ttgggacgtcttcgcgttcgagtacacattcgaagtcgtggtgttcatcctgatgtcgtgcgggatcgcggtgagcgtcaacttcagcaccttcctggtgatcggcacgacgtcgccagtgacgtaccaggtgttgggccacctcaagacgtgcctcatcctctccttcggctacgttctcctcaaagaccccttcacgctccgcaacctcaccggcatactgatcgccatcttcggcatgggcctctactgcttcttctccgtctccgagagcaggaagaagaccgagggcgccacgttgcccgtcaacacccagatgagcgagaaggattcggcaccgctccttggcacgaaaacctcgccgtggcaggagagcaacggggtggagaactttgacgacgtgccacggac

SEQ ID NO: 9292 - DNA, 297 bp, Triticum aestivum
  Clone ID: uC-tsrow189067c11b1
tcggatcgagccatccgcatcgccgtcgccctcgatcgccttcccttccgtccctcgcttccacacaactcccagggcctgctgctgaaacctgcttcttcttcttcttcttcttcgtcgtcgtgttgtttgctgtggatatatccgacggggggagatcgaccagatgactggctgccacggcaacggcaacggcaactcgtccgtatccaccatgggacagcagacggtcactgagaagaagttcggaggaatcgcaccaaagaagcctctgatttcaaaggaccatgagcgcgc

SEQ ID NO: 9293 - DNA, 423 bp, Triticum aestivum
  Clone ID: uC-tsrow189067c12b1
tttccggtcagcgctgtgatgcccctaccgcacctgcagacgtaggtgctgaagccggcgggggctggaaccgcagggttaggcgaggccgtatcccagatgaacgggaaccagatgcacagcgagtaagtgcactagagaaggcattgactggcttcgcggagaggcagactgatgttgttgttaatccaacagtggggacctgcttcgattcgattacagaggcatatgatttttataacctctattcctgggaaatggggttcggtataaggtacggcaagagcaggcggaatgcaaagggtggtaaatgcatgcacgaaattacttgtgttaattcgggtaaaccaaatatgggcgggaaatcgcgcatgtgcgagtgcacagcactaattaggctactcagaactgatgacaacggat

SEQ ID NO: 9294 - DNA, 426 bp, Triticum aestivum
  Clone ID: uC-tsrow189067d01b1
tctttaattcctcgcgattcctctcccctcgcctgctcgtcctccccctcctaggggatcgccggagaggaatcgcgacgagggcttcctcctatcaggttcgtggctcggcgaccctctgttcccgttaaatcaaagccatggagcacaaggagaccggctgccagtctcgggagggccccatcctttgcgtcaataattgtggcttcttcggcagcgcggcgaccatgaacatgtgctccaagtgccacacggagatggcgacgaagcaggagcaggcaaagctggccgcctcctctttcgacagcatcgtcaacggtggcgatgccgcgaaagaacatcttgctgctggcagcacggcggcggcagttgctcacgttgaggcgaagacgcttattaccgcacagcctgctgatatcgctggtc

SEQ ID NO: 9295 - DNA, 293 bp, Triticum aestivum
  Clone ID: uC-tsrow189067d02b1
ctggaagatggaggtacggccgtgccataaaaagagtctgctttggaggaggcgggtgcaatggatgctgacttggtgactgcacataagtgatacaaatggtttgctgaactggaataaactatgaaatctcagactgaggaaaagtctcgcctatacgagagtacattagaggaacgtgttaacacatgtgatgacatccttcaacaagtggatgggacacagaacttatttgaagaactacaatacttgcactcaagtgttgccataaagacacaaactttgcatgatgc

SEQ ID NO: 9296 - DNA, 341 bp, Triticum aestivum
  Clone ID: uC-tsrow189067d03b1
ctaccccaccccccgttccagagcgcgatcacacaacagagcggtagcagttcctgggccgttcccgccccggccggcgccatggacttcgtcttcgtggagaagctcctcgtgggcctcctggcggccgtggtgggcgccatcgtggtgtccaagatccggggccgcaagctgaggctgccgccgggccccttcccggtccccatcttcggcaactggctgcaggtcggcgacgacctgaaccaccgcaacctggcggcgatggcgcgcaagttcggcgaggtcttcctcctccgcatgggccagcgcaactggtggtggtctcctcgccgccgctggcg

SEQ ID NO: 9297 - DNA, 407 bp, Triticum aestivum
  Clone ID: uC-tsrow189067d05b1
tttcttaaccatctatctggtctgatcattggtcaggacaacaatgatcctgagggctgtgacttgattcaccttagagccatgtctgaattgaggtaccttcagattgagagacttgatagggctacttccggagcttctgcactcgcaaacaagccattcctgaaggttctacacctgtctgagcaagcagcattaattgaagaagaagagaatgaggaagaacaggagaaccaagagggcgcagagaaagaagaaaaggacaaacatgaagtaaaaagtgctcagtggattagagatgattcagctaaagtgagtgaaaagatatggaatgagctcaccccacccaatagcgttgagaagctggtaatcaagaactaccaaggtcgaaagtttccaaactggat

SEQ ID NO: 9298 - DNA, 222 bp, Triticum aestivum
  Clone ID: uC-tsrow189067d06b1
agttttgtggcggcgccccctcccccggcaacccatcctccctctctttcccccctccccgccgccgccaatagcccccgccgggcgaagcccgcgcggatctggcggcggtgggctgccattttccgtgtggctcgttcacgggctggaggagccccgtgtggcggctaccggcgtggcgtgactccggcgcgcagcggttcatccagtggaggctgggga

SEQ ID NO: 9299 - DNA, 435 bp, Triticum aestivum
  Clone ID: uC-tsrow189067d07b1
ttttggcgagggggagacgtcgcgtccgccatggggtgctccttctccgggctcaacgcgctgtacgccgccgcggtctccgacggcaccgccggagcgggacccggcgccgcggggctcgccaagaagaagggcgtcgacccgtcacacatctcagctgatgggacttatgctttgaagaaagtttttattcagagcgaccaacacttggagctagtacggcaggagatccgagtgtcctctcaattcagccatccaaatttacttccacttcttgaaaatgccattattgcagtcaagggtgtgcaagatgggtcgcagaaccatgaggcttacttgttgttcccagttcacttagatggaaccttgcaggatgtaactaaatccatgcaagaaaagaaggaatacctttcaacaatcaccattctccagata

SEQ ID NO: 9300 - DNA, 346 bp, Triticum aestivum
  Clone ID: uC-tsrow189067d08b1
tcgcggacgcgtgggttgattagctgattcagtctgcgcgacggagcccctccatctccatggacgcagcagaagagacgagattactgctccaagaggatggggatcaggatgcaagtctttacacaggtgatgggtccgttgacatcaaaggccgtcccgcaacaaggcgcgacacaggcaattggcgagcatgcgtcttcatcctaggaaatgagtgttgtgagcgtctggcctactatggaattgcaaaaaacctagtcacttatctcaaaataaagcttcatcaaggcaatcttgaagctgcaagaaatgttaccacttggcaagggacatgctatctgtc

SEQ ID NO: 9301 - DNA, 394 bp, Triticum aestivum
  Clone ID: uC-tsrow189067d09b1
ttttctagaggcagaacaagccgctggccagtggccatggagtgcggccagtgcagcgcgcgcttggctgtcacgcggggcgcgagctccgttcagtgcgcgcactgccgcagggcgacgcgcgtcgaacggcacggcgccgtcgtgcacggggccgtcggcttcgtcaggagcgtgttcacgaacattggccgggcgaggccgcacccggggtacccgccggtgcacggcaacaagcgcgctctcttggtcggcatcaactacaccggaacggcggccgagctgcccggccccatcaacgatgtcaagtgcatgagcttcctgctcaccctcaagtacggctttccaggcgattgcatccttgtccttaccgatgaagagcgcgacccctaca

SEQ ID NO: 9302 - DNA, 292 bp, Triticum aestivum
  Clone ID: uC-tsrow189067d10b1
tttcgccacgcgttcgcaagaattcctcccaccctcgccgtctcgccgccgtcaccaccgcagctagataagagaaaaaaagagagagaagaactcgccgggagggctcgagatctgtgttcggagaggggaattcttgaggtcggaatcggaacaagcgggcgcgctcgggatcggggttaccatacaatttttgccaggaacctttagtgaatgtgctaatggagtcaaagggtggcaaaaagtctagcagtagtagttccctgatgtacgaagctcccctcggctacag

SEQ ID NO: 9303 - DNA, 440 bp, Triticum aestivum
  Clone ID: uC-tsrow189067d11b1
tttcggcccctgctcccatcccttccacctcccctcccgctgcatcggctctccgctcagcatccctcccggtcacctccatccctcctgcatccgcctccgcttccttctccggttccctccaccgcgctattgcccctcagcccatccaccccagccactccctcccggccttctcggccgcttctctccccgcggcagccgacgtctgccctccgcccccgggcccccaccattccaactcgctctcggagttcgccgcttccgcatcccaatcccgcgtccaccgccctcccactcgcgccgcggtgcgcgcggaccgcccgcccccgctggagctgcgcccgaggccatcgagggagtcacagtctggcatcgccctctgtgctctcgcctgctgtgctgctcctggtgccgggacctccactcacctctgggcg

SEQ ID NO: 9304 - DNA, 444 bp, Triticum aestivum
  Clone ID: uC-tsrow189067d12b1
tttttcatgcactcacagcggtcggatcaggccaaacctcccttggcatcaaagctgccaatggtgtagttatcgccaccgagaagaaactgccttctattttagtggacgaaacatctgtgcaaaagattcagtcgttaactccaaatattggagttgtctacagtgggatgggtccagattttcgtgttcttgtcagaaaaagtcggaagcaggcacagcagtattatcggttgtacaaggaaaccatccctgttacccagcttgtccgagagactgctgctgttatgcaggagttcactcaatctggtggcgtaagaccatttggtgtatcactgttgattgctggctatgatgacaatggcccgcagttgtatcaggttgacccatcagggtcttacttctcctggaaagcatcagctatgggaaaaaatgtgtcaaatg

SEQ ID NO: 9305 - DNA, 411 bp, Triticum aestivum
  Clone ID: uC-tsrow189067e01b1
ttggtcatgtcgactctggcaagtcgacaaccactggccatctgatctacaagcttggaggtattgacaagcgtgtgatcgagaggtttgagaaggaagccgctgagatgaacaagaggtctttcaagtacgcctgggtgcttgacaagctgaaggccgagcgtgagaggggtatcaccattgatattgccctgtggaagttcgagaccaccaagtactactgcaccgtcattgatgcccctggtcaccgtgacttcatcaagaacatgattactggtacctcccaggctgactgtgctgtgctcatcattgactccaccactggtggttctgaggctggtatctccaaggatggccagacccgtgagcacgccctccttgctttcacccttggagtgaagcagatgatct

SEQ ID NO: 9306 - DNA, 127 bp, Triticum aestivum
  Clone ID: uC-tsrow189067e02b1
gggagatcacggagtgcgatcgacaccgtgcagtacgcagacgttgcctcgccgattgcccggaccggcgagcgccaaagcgccagccagcaacggaacgcaaggaattgcaatgggagatgggccc

SEQ ID NO: 9307 - DNA, 437 bp, Triticum aestivum
  Clone ID: uC-tsrow189067e03b1
ttgtaaaagacaaggataaggagcgccatagggaccgtgacagagatagaggaagagacagagatcggggtcgggacagggatctagacaaggatcgggacagggacaaggatcgggatcgccaccaaaggcatcaccgtgacaaaagggagcaccgagaccgtcctgatgatcacgatcgtcacagaagccgtgattctgaaaggagaagggaccgcgagagagatggacatcgcaggcatcgctctcgttcacggtctcgttcaaggggcagggatgatcacagatctcgatctcattcaaaaagcaagcgagtcagtggattcgacctgggaccaacagcacaatccgtacttcctcagttccctaccattccaaccccaagtcagttacctggctcttctattcctggaatgttcccgaacatgctccctttt

SEQ ID NO: 9308 - DNA, 518 bp, Triticum aestivum
  Clone ID: uC-tsrow189067e04b1
tttgtgcaactgactgaaggcggcataagtggaacagaggatgcggaggaggctttgatttcttctctgccgatgggacgagctggtggcggcatggattatgaagggggcgaaggagctggtatggggggtgcgcgtcgtatgatcttggcgatgaagggatggcgattcctgcgagataggcagtgcaaatatagtccctgatgctgcggaccaggatccagacgaagatggcatgggagtgtcaagtgcaaaccaatcttcttggatcaggagggtcaaagttggtgtgtcacagccaaaaactatcttaacagctcgcgcgatggaaattgcaataggcgacgtcatgccgcggactgcacatcggtggtgcaaatggcacgtcctgaagaaggcaaaagagagccttggggcactgctttgcaagggaagtgaattcaagccagaattcacatgctagtccaccacatagttagtattgatgaatttgagaagggctgggcatgcatgattga

SEQ ID NO: 9309 - DNA, 56 bp, Triticum aestivum
  Clone ID: uC-tsrow189067e05b1
tggacgcgtgggcgtcggcggtgtgctgcgaggacgtcgacgccgaggaggaggtg

SEQ ID NO: 9310 - DNA, 454 bp, Triticum aestivum
  Clone ID: uC-tsrow189067e06b1
ccgaaatcctaaagcccgaccagtcgaccaccagccagctcctccgtcctctccccccacgcctggcgtcccaccgccgccgcccccgccccgccgtcgccgtccggcgcatcccgcctccccccctcgagcgagcagtcggtcacttggtggaagatccgtcccccgccggcaaccgaatcgggaagaggaggagggggccgatcgaagctccgggcgagagtcgccggccatggttaaggagacgggctactacgacgtgctcggcgtgatccccacagccagcgagtgcgagatcaagaaggcctattacatcaaggcgaggcaggtccacccagacaagaaccctaatgacccccaggccgcagggaagttccaggaactgggggaggcataccaagtgcttagtgaccccgctcagcgcccagcttatgatgcacatgggaaatctggc

SEQ ID NO: 9311 - DNA, 453 bp, Triticum aestivum
  Clone ID: uC-tsrow189067e08b1
tttaaggatgtattgccaagaattggccaatggaatatgaggcataagaaaatggtcaatggtggtagagttaaggagtggatatgtattaactttgctcggaatgtccaagatagtgctgccaggagtttctgtcgtcagctggctgacatgtgcgaaatatctggaatggacttctcaaaggatcctctgcttcctcctttatgtacgagagctgagcatgtagaaagagcactcagggcacactatcgagatgctatgaatattctgaaaccactgggcagggagcttgacctgctcattgcaattttgcctgacaataatggtcctctttatggtaatctcaaaagaatatgcgagacagatcttggattggtctctcaatgctgtctcacgaaacatgtttttaagacgacacagcagtatcttgcaaacgtcgcccttaaaatcaat

SEQ ID NO: 9312 - DNA, 118 bp, Triticum aestivum
  Clone ID: uC-tsrow189067e09b1
tatctccggggagcacctcgaccccgcagcctcggcgtccgcgtccgcgcccgcatccgtcgcggaggtcaacgcgtggctggcttccctggcagcggagggcggcggagtgggaggg

SEQ ID NO: 9313 - DNA, 397 bp, Triticum aestivum
  Clone ID: uC-tsrow189067e10b1
ttttgctgacagtgatttctctgagcagtctttggagcttaaggaaccggttcttcggcagattactctcgaagcggataatctgttatggttaaccgagattttggctggcaggaatgctgcagaagaatttgcaggcttgtggtctaaccaacgtgagctggctgggcttcattccaagctaccgaccaagtcgcgccaccttgtgagctgcgtcactgccaggctctttgtggcgattgggaaaggcgaaatgctcccgtccaaggacaccaggcagctcctcctggatgtctggctgcagcctctcatggatgactacaactggctgcagcacggttgcaggtcgttcgaccggaccgtcgtcgaggaagggatcgggtcgaccatcctgacg

SEQ ID NO: 9314 - DNA, 251 bp, Triticum aestivum
  Clone ID: uC-tsrow189067f01b1
tcttcacgcgtccgcccacgcgtccgcccacgcgtccgcggacgcgtgggtggcattatactgctggagatattaaccgggagagtacccttccctgagcaagacctgccacttgaacagttggcgtccatctattttgaaggcaagatgcctcttgcagagctgatggactcgagcctgggctccttccctgaagaaaccgcgcgcgcgttgtgcgacgtcgcgaggtcctgcatcgacccggacccgag

SEQ ID NO: 9315 - DNA, 302 bp, Triticum aestivum
  Clone ID: uC-tsrow189067f02b1
tttatttccttcacgtataaatggctccctcctgcggatgataaggatgaagatcgccgtcagcccaagggccttaactttctccatgatgccaacctgccggtgatctacaagcaggccttcaacatctactggactagggtcagtttgagccttcacgagctcgacatcggagccagcactctacatgcttatcgacgcggtggccatcgaggtcaaacttgtccggaaatatttgtcggagtaatggatgtatctatacgcatgttagttttagacacatccatttttatgcatttctt

SEQ ID NO: 9316 - DNA, 407 bp, Triticum aestivum
  Clone ID: uC-tsrow189067f03b1
ttgtccacgcgtccgcccacgcgtccgcctgcacctttccaccttgcctgcccccctcccctccgtctcccccacgcgaccgcacgaggtgcaggacgggatccgtccgttgcttcccacggtcgcctccgttccgtggactgcaccgggcccgccgtccgtccgtccgtccctgaaagcaacgcctgatcggattcacgagggggtcgactgccgctgctcctcgacggccaccaccgtcacctgccgcaggcaagggaatcttcaaaggagaaatctgaagagcacacaaacttggtcttctgagctgaactcctggccgacgaagcagaagccatggggtcaggggactggttcaagaccatcatcagcaagaagaagtcgaaacggggcaagtcaaagcacgc

SEQ ID NO: 9317 - DNA, 390 bp, Triticum aestivum
  Clone ID: uC-tsrow189067f04b1
tttttacgcgtccgcacggaaccaacaaatccccacccaatctcgtctccgatcgactccacgctcgtcgaatactcctcccctaccgcctcaagatgcagatctctgcgaagaccctgactggcacgaccatcaccgtagaggttgagcgctcccacaccatagacaacgtgaaggccaagatccaggacaaggagggcattcccccggaccagcagcgtctcatgttcgctggcaagcagctggaggatggccgcacccttgctgactacaacatccagaaggagtccaccctccaccttgtcctgcgtctgcgtggtggcatgcagatcttcgtgaagaccctcaccggcaagaccatcactcttgaggtggagagctccgacacca

SEQ ID NO: 9318 - DNA, 417 bp, Triticum aestivum
  Clone ID: uC-tsrow189067f05b1
tttgtgcagcagctggtggagcgcggcatcgatctcgtgtacggcggcggcagcgtggggctgatgggcctggtgtcccgcgccgtgcacggcggcggcgggcgcgtcacgggcgtcgtgccccggtcagtgctcccgcgcgagctcatcggcgagacgcccggcggcgaggaggtgaaggccgtgtccggcatgcaccagcgcaaggccgagatggcccgccgcgccgacgccttcgtggcgctccccggcggctacggcacgctggaggagctgctggaggtcatcacctgggcgcagctcggcatccacgagaagcccgtgggcctgctgaacgtggaggggtactacgactcgctgctggacttcatcgacgggcggtggacgaggggttcgtgtcgccggcggcaaggcgca

SEQ ID NO: 9319 - DNA, 441 bp, Triticum aestivum
  Clone ID: uC-tsrow189067f06b1
gatgtctggctggaggacatcgtgggaaggccaaatatccgagctgaagaagcggagcacggtgaaggatgcagaagagaacctatcctggggagctcagatgcgaagaagaagggccgaacaattgtgacagtgcacctcttacactcttatgtccactagccatccgtagcatctaaactgtcgatatctttgtgtagcaaaagttagaaaggttattcttaagaagcatggttaggatcggagtacagccatggcgctgcttgagtcttgcctggtgtatgctaaaccatactaccatacatggctcacaggaaacatatagttcgctaggtgccggatgtatgttgaacccacggcgtcgctcctccttgaatctttacctgatgaaatgtaaatataatgagacagaagtaatcaaatctagttgtactatgaact

SEQ ID NO: 9320 - DNA, 308 bp, Triticum aestivum
  Clone ID: uC-tsrow189067f07b1
ttttcttcccacgcgtccgaacacaatcagtcttgctttctttacttatccagtgaagttattaagatatttgggtctgatccatcttgtgcaagctatcttacatgtctgatacagacactctttaatcatacaatacaattgctcagaactattcaggattttacagctagacccgacatagctgatgattgctttctgcttgcgtcaagatgtattcgctactgtgctgatctatttgtacctacagagatttttccaagattggttgattgtgcaatggctggtgtaactatacaacataggga

SEQ ID NO: 9321 - DNA, 376 bp, Triticum aestivum
  Clone ID: uC-tsrow189067f08b1
cccacgcgtccgcccacgcgtccgtaagtatggaagtgaaccaaagtctactacctaaggttcagttcaatcttgagttgtcagaaaaggagcgcagtgacagggcaaatgttgttcttcctttcgaacatcaaggaaagggcgagccaatccgtatatacgatggacggcgatctctcccggaggctcatcaagatcccaatttaactacggcagctctcctggatgaaacagaagctcttaaatctgcaaacccgaagggtgaaattcattaccttcgtgattctgatgatgagcgacctgactcggatgaagaccccgatgatgatttggatatttagccacaatatgagctctgtttatcttagtgggcagc

SEQ ID NO: 9322 - DNA, 361 bp, Triticum aestivum
  Clone ID: uC-tsrow189067f09b1
cggttatccgctcctgagtgattgcaaataaaccgcttgagggggttcggtgattcatttcggtaatcacaacatcatcatgtattccccgcaaaaaaaaataaaaaatcatgtattaatgctggaatctcacagggggtggtcttttggtcctgaataagttattctgcccaatcttgacaatttcttcttgtatttatgtttcgacgtcatgacttcttccccagatccattgtatactactaatactactccctagtgcccatgttgaaaagtaaatgacgtttctggcattattgatatgttgccaaacacaaagttttagccaatatttccttttgcgagatggtactttgcttgt

SEQ ID NO: 9323 - DNA, 412 bp, Triticum aestivum
  Clone ID: uC-tsrow189067f10b1
tttttaagcgtccttccttcaacaatggctctgctcaagaacttcgccgctttcctgtgcgtgatcctggcctcggtcgccttcgtcgcgcaggatgcgctcgccgccagagcaggtgctttgaacaacgtgaagggatacacgggtacctacacaggcaacccaggcggtggttacggcggtggttatgggaacgggaagtatccatgataggccgtatatgatgatacttggagcacggaaatacaaatacgtacggcagaccatgaataaattatcacccgttactggtatatcgtactctcttatccataataagtgtcgcagttttgtacgaaggtcaattcactcttaatacaaaattgcgacacttattttagatcagagggaatacgtaaatcatagtgaatgt

SEQ ID NO: 9324 - DNA, 446 bp, Triticum aestivum
  Clone ID: uC-tsrow189067f11b1
ggaaggaagtggccgccggcgagcggtacctcgaaagacggacaagagatggcgtggcggctggcgctgccgctgctgctcttctactcccgcatcctcctctgctcctcccaagtccaagacaatgatccctccaaactgctcaagagcgcctcctagatgatgagcctaaggaaatacgacggggcgctcggtctgctcaacgctgtcctcgagctcgaccccaaccattccgaagcttacaggcagcgcgcaacagtgcttcgtcacagatgcagacacaaggaagctgagagtgactataacaaattactggagctcaagcccgggactgcttcagtggagaaggaactagctcagctgctgcaggctcaaaacgcattggaatccgcttatagccagtctgatgctggagaattctcaaaagtcctggagtacgtcaacaa

SEQ ID NO: 9325 - DNA, 120 bp, Triticum aestivum
  Clone ID: uC-tsrow189067f12b1
tctgtttaggccgactgaaggcggcataagtggaacagatgatgcggcggaggctttgatttcttctctgccgatgggacgagctggtggccgcatggattatgaagcgggcaaaagagc

SEQ ID NO: 9326 - DNA, 325 bp, Triticum aestivum
  Clone ID: uC-tsrow189067g02b1
gaggacaaagccacccacccaccaagagtcagtctctccctccttcccctcgtgcggtagcctccaaatcatccaacgtccaatccacttccaacaagataccgccaccatcctccgcctgatccgacctctcttccatcagcgacagcgaccccgcaacccccggctccatcgaccatcgggcgagggaatggaggaggagggcgcgaggaaggcggtgctcttccggctgttcggcgtcgaggtccgcggcgcggaggaggaggatgacgcggagcccatggagctcaagaagagcaccagcatgcccaacctcgcctgcgcc

SEQ ID NO: 9327 - DNA, 351 bp, Triticum aestivum
  Clone ID: uC-tsrow189067g04b1
tgttggctgcaatttgtaagcaggtgttgaaaggactgatgtacttgcatcatgagaagcgcgttatacaccgagatctgaaaccatcgaatatattgataaatcataggggtgaagtaaagatatcagattttggtgttagtgccatcatttctagttcttctgcacagcgagatacatttactggcacatttaactacatggcgcctgaaagaatcagtgggcagaaacatggtcatctgagtgatatctggagcttgggcctagttatgctggaatgtgccactggcaatttcccatatcctcctcgtgaaagcttttatgaacttcttgaagctgttgtcgaccaac

SEQ ID NO: 9328 - DNA, 310 bp, Triticum aestivum
  Clone ID: uC-tsrow189067g05b1
tgttacttcatgtgccagggcggcgacttcaccaggggcaacggcaccggaggcgagtccatctacggcgagaagttcgccgacgagaagttcgtccacaagcacaccaagcccgggatcctctccatggccaacgccgggcccaacaccaacggctcccagttcttcatctgcaccgtcccctgcaattggctcgacggcaagcacgtggtcttcggcgaggtcgccgagggcatggacgtcgtcaagaacatcgagaaggtgggctcccgcagcggcacctgctccaagcaggtcgtcatcgccgact

SEQ ID NO: 9329 - DNA, 379 bp, Triticum aestivum
  Clone ID: uC-tsrow189067g06b1
gcgcctcacgcgtccgggtatacctacacttgtagcctcagttatcttgccagtgccagctgagctagctatatagctccgtcgcttgcttccgagttccgacagctcgctccgatgacggtggcggcggcgggcgcgggcaggcgttacgcgctgttgctggcggtgaacgactcggactacgccaggaaggcgcacggcgggtaccggaacgtgttcttccgcgccctccgctccggcgaacccgacgaggcgtgggactgctaccgcgtaatcgacggcgagttcccggcagcagaggatctgggcctgtacgacggcttcgtggtgagcggcagcccgcacgatgcccacggcgacggcgccccgtgctgggtcc

SEQ ID NO: 9330 - DNA, 415 bp, Triticum aestivum
  Clone ID: uC-tsrow189067g07b1
tttctccaccctcgccgtctcgccgccgtcaccaccgcagctagataagagaaaaaaagagagagaagaactcgtcgggagggctcgagatctgtgttcggagaggggaattcttgaggtcggaatcggaacaagcgggcgcgctcgggatcggggttaccatacaatttttcccaggaacctttagtgaatgtgctaatggagtcaaagggtggcaaaaagtctagcagtagtagttccctgatgtacgaagctcccctcggctacagcattgaagacgttcgacctgctggaggcgccaagaagttctctgctgcatactcgaactgcgcgaagaagccatcctgatatcgtttttggcatccccttcccgtagtttaggatttttatgcaattttattctgactcttttctc

SEQ ID NO: 9331 - DNA, 346 bp, Triticum aestivum
  Clone ID: uC-tsrow189067g08b1
tctgtttttctctcctcccctcccttcctagctctcccaggtcatggcaaaggtgaaaagcggataaaactagcaagtgggagatcgacgcaggtgaacaccccagctacaagtagtagaggaagtggaattttatctgtggagaaaaagagctgcttgagtgaccatgatgggaggtgggctgctgatggatcagggcatggccttctccggcgtgcacaacttcgtggatctgctccagcagaacggcgccgacaagaacctcggcttcggctaccttatgccgcagactttctccggcgaccagtgcgtcatgggcgagggctacctcgtggacccgccgact

SEQ ID NO: 9332 - DNA, 389 bp, Triticum aestivum
  Clone ID: uC-tsrow189067g09b1
tttcccacgcgtccgcccacgcgtccgcccacgcgtccgcaacaagtacattggagttatctcagtgcatcagaattgtttctttcatgcagagtttctgctgctatttgttaaatcttaaagaaacgtctgttcctgaggtttacaagtccccttgttcaaatatgaaaatgatttatttgcaaacttcaatgcaaaatggttagtcagtctcgaacaactgcatgtatatatactttctagctatgctattgatgccacatccagattacacttttcttctctttttcttttcttgggagtagaaaggtctcactcaaggatcgagcaaatgcagctctaatgcttgtgtcgtctaattcaaagcatgatgactctaaatgttcatg

SEQ ID NO: 9333 - DNA, 236 bp, Triticum aestivum
  Clone ID: uC-tsrow189067g10b1
tttcttcgggatgcatacataaatgctatccggcgggcaaaggacttcatctacattgagaaccagtacttccttggaagttcctactgctggaagcccgaaggcatcaagcctgaagaaattggcgctctgcatgtgattcctaaggagctttcgttgaagattgtcagtaagattgaagctggcgaacggtttactgtttatgttgtggtgccaatgtggcctgagggtgttcc

SEQ ID NO: 9334 - DNA, 94 bp, Triticum aestivum
  Clone ID: uC-tsrow189067g11b1
cccacgcgtccggtcaatgtgggcaacattgaagtgcccgccagtctgaggccgtgcgttcacatgttcttaatgtttgtgctaagcccggaca

SEQ ID NO: 9335 - DNA, 396 bp, Triticum aestivum
  Clone ID: uC-tsrow189067g12b1
tttttagagcaccaagctcgcggcgatcctgatcctccaggccgtcctggtcatggggatcctctcacacgtgaacgccgactatttccccaagtgctgcaacaactgcaggtccttctcgggggtcgacgtctgcgacgacgcccacccccagtgccccaagggctgctcggcctgccgcgtggtgacgccgagccctcacaagacgttccggtgcgccgacatgaatagcaccgtcgatggcacctgcggcgggccatgcaagaagcactgatccgttcagggcttcaggctcagacgaggtgtgccgcctaaaataaagctcagatgagatgagcagtcatggtgcctatgcttgtgtgtgggtcgtgctatacggccaacaatatgtatact

SEQ ID NO: 9336 - DNA, 396 bp, Triticum aestivum
  Clone ID: uC-tsrow189067h02b1
tttgcaacaccggacccattaacattgggaacccaggtgaattcaccatgctggaacttgccgagaatgtgaaggagttgatcaacccagaagtgacagtgacgatgactgagaacactcctgatgaccctcgccagaggaagcctgacatcaccaaggccaaggaggttctcgactgggagcccaaggtcgtcctgcgcgacggcttggtgctcatggaggacgatttcagggagcgtttggcagtgcccaagaagaccaaggcctaattgccctccctacgtttggcgtacaacatgaccaattagccagagcatactcatagttgggtgggttcgtcaatattcgttgctgcgtttcgttacggaatttgagttccaataaaccaattacacc

SEQ ID NO: 9337 - DNA, 367 bp, Triticum aestivum
  Clone ID: uC-tsrow189067h03b1
ttcccggataacaaaaagtggaaggtgaagcagccatggcgaccatcacggcgcctccctgctccccctctccatcgtgtatgttcctcacccgcagctattgctgctcgaggtcggcgccaagagcggccatccgctcatctgctgtggcggcggcccggcagacgctctcctccggatgggacctgtccgggctgtcgggagcgcgaccggcagctggaaaagcccgtctcgaggagttggacaccagcaacatgcttctccgccagcgaatcatctttctcggctccccggtggatgatttgactgcggatcttatcaccagtcaactcttactgttggatgcaaaggaccacacaaaggatat

SEQ ID NO: 9338 - DNA, 415 bp, Triticum aestivum
  Clone ID: uC-tsrow189067h04b1
tcttcacgcgtccggtcatgccagctttattcagagcacttgatgattatgctgtagataacagaggagatgtgggttcttgggtacgtgaagcagcaatggatgcgctagaaagatgcacgttcatcctctgcaagagagatgctgttgcagtgagagcagcgccagctgctgaggatgagtctgagccaagcgacatggatgcaaatgcaattagtaccacatgccaactatttgattctgctattgcacagggtctggtcgctggcattgcaaagcaggcagttgagaaaatagataagataagagaaatagcagtcaggactctgcagaggattctgtacaaccaagaacagtttgtcccgtctataccttacaggaagctgttggaagaaattattcctaataattctga

SEQ ID NO: 9339 - DNA, 315 bp, Triticum aestivum
  Clone ID: uC-tsrow189067h05b1
ttccacgcgtccggctcaacctgagcttcaactggttccatggggagattccagcaagcctcggccgcctccgtcgcctacagaggctagacttgaacgacaactccttctccggcaagttccctgtaaacctgagctcctgcatcaggctgaacaaaatgggactacacaacaacaagattggcggccacatcccagctgagctcggcgaaaagttcatatccctggcagtgatctcgctgaggaacaatagtttcacaggtcccatcccggggtcaatggccaatctgtcctatctacgatatcttgatttct

SEQ ID NO: 9340 - DNA, 312 bp, Triticum aestivum
  Clone ID: uC-tsrow189067h06b1
tttctcattgatgctgtttcgtgcatggcgaagaactccaattatgtgaaagctatgttttctggctcgatggatggggatattcgactatgggacattgctgcaaggaagacagtctgccagttccctggacaccagggtgctgtgagaggtttggcaacatctaccgacggcgatcttctgatatcctgtggggtcgattgcactgttcgactctggaaagatcctatgcgtaagatgatggacactaatgatgctattggagatgcttcccagccgtcagcagtctatacatggaagcatgcattttgg

SEQ ID NO: 9341 - DNA, 376 bp, Triticum aestivum
  Clone ID: uC-tsrow189067h07b1
tttcggacgcgtgggttgtagtaccacaaggaagggataggagctctgtggctctctctgctttctgaggttgtgccgagatgaaggtccctctccctgtgaggagcaagagcttcaagaagagcaggggagcttcatgcagcctccccctgctgctgctcatcggggccgtccagttcttggtgatcggcaagccttttccgtcgctcttgatggatagcagcaggaggagggccttcttcaatctcgcagaggaggagttcatcccggagcctcaggtgagctgcgacttcaacgacacgagatccgactactgcgagatggccggcgccatccgcatccgcgggagcacgtcggaggtgttcgtcatgacccc

SEQ ID NO: 9342 - DNA, 345 bp, Triticum aestivum
  Clone ID: uC-tsrow189067h08b1
tttctgcgagcatcgaccatgtcggcctactgcggcaagtacaaggatgagctcatcaagaacgctgcctacattggcacccctggcaagggtatccttgctgctgatgagtccaccggcaccatcggcaagcgcttcgccagcatcaatgttgagaacgttgaggacaaccgtcgtgccctccgtgagctcctcttctgcacccctggtgccctccagtacctcagcggtgtgatcctgtttgaggagaccctgtaccagagcaccaagggtggcaagcccttcgtcgacatcctcaaggcgggcaatgtcctccccggcatcaaggtggacaagggcaccatc

SEQ ID NO: 9343 - DNA, 329 bp, Triticum aestivum
  Clone ID: uC-tsrow189067h09b1
tctggccgatctccgccagccatgtcgcccgacgacgtgtcccggaagtcgcccgtgccgccgccgtccccgccgccgatggactcgtgggctcggggagggcgtcgctccaggcgccgtggcagcagcggcagcgccagctctggcggcggcgtcgagtccgaggaggagtacctggcgctctccctcctcatgctgtcccgcggcgtccgcggcgaggtcgaggacggcggcatcggaggcgtcaagggcttgggagcggcgccgaccaaggcgcaggggtacgggtgctccgtgtgcggcaaggtctacgcgtcctaccaagcgct

SEQ ID NO: 9344 - DNA, 243 bp, Triticum aestivum
  Clone ID: uC-tsrow189067h10b1
ttctggccatcagccctctttgagtgtgtggtacagacagtaattttccagggtagcaagagagagtgaaagcagaatggtgaagctcgcattcgggagctgcggtgactccttgagcgccacgtccgtcagggcgtatgtggcggagttcatcgacaccctcctcttcgtgtttgccggcgttgggtccgccattgcctatgggaaactcaccgatgatggcgcgctcgacccggctggcct

SEQ ID NO: 9345 - DNA, 248 bp, Triticum aestivum
  Clone ID: uC-tsrow189067h11b1
gatgcccacaaaaaaaattctccagttttttcccaatataataggcacccttcctacttgcgacaccattattttgggtagtcaagtcacatcacattactcatgtgattaaactaaacgacgcgctagacacgttacactagtgtttgacttggtacagaaatgaaataattgaaaagatactgttcatagctcatgtctgacgaccttgcaagcttgcaatatcatctgcttcttcgcttttcttt

SEQ ID NO: 9346 - DNA, 167 bp, Triticum aestivum
  Clone ID: uC-tsrow189067h12b1
cccacgcgtgcgagtcagggtaactggagacagggctcaatgactggaaaaacactttacgtctcgaagagtctggtgcgctctttacgatccttgaaaatcaaagggaaagaatgattttctcacctagtggtactgataaccgcagcaggtcttctaggtgaaca

SEQ ID NO: 9347 - DNA, 342 bp, Triticum aestivum
  Clone ID: uC-tsrow189068a03b1
cctacgcgttcgcccacgcgtccgttcatgggcaggacttgttcaattacaagccgggttaggaaaggagcttctgaagtatagagaatcggcgcaggtggctgctgttgaagccatgcaggaagcttcagctgcagaaagcttgctgagatgtttgagctcgtacgccgaggtgagctcgacggctgaggagcagaacccgcagccgaccgttgagcagttcctcgccctccacagctcgctctcccgcgccacggtgatcactgacaccctcaccaagtcagcagccccgccggaatgctcagcggccagcgacgccgggacggtggcctctgctaccga

SEQ ID NO: 9348 - DNA, 138 bp, Triticum aestivum
  unsure (1)..(138): unsure at all n locations
  Clone ID: uC-tsrow189068a04b1
ctttcctgttagcaaggngggactatcgccagggtgcttagtgacattcgacaggggtgggcggacnacaacagagagaacctcctccaggaagaggaggagcaagtggaagaggcttgagtgccaagcaacaaacta

SEQ ID NO: 9349 - DNA, 361 bp, Triticum aestivum
  Clone ID: uC-tsrow189068a05b1
gttcatatttcaagagatactcatgggtatgttggggctggtctaactgcacttgggaccgaggctgctctccaatgcattcgtgagaagatggatattattgatcttgaggacgagacaatagatgctgagatactcaactctatggctgtgacaaatgaccatttcaagaccgccctgacgacaagcaacccgtctgctctccgtgaaactgttgttgaagttcccaatgtttcttgggaagatattggtgggcttgagaatgtcaaaagggagttgcaggagactgttcaataccctgtggagcatccggagaaatttgagaagtttggcatgtctccttcaagggtgttttgttcta

SEQ ID NO: 9350 - DNA, 343 bp, Triticum aestivum
  Clone ID: uC-tsrow189068a06b1
gttcatattttaagagatactcatggatatgttggggctggtcaaacttcaattgggaccgaggctgctctccaatgcattcgtgagaagatggatattattgatcttgaggacgagacaatagatgctgagatactcaactctatggctgtgacaaatgaccatttcaagaccgccctgacgacaagcaacccgtctgctctccgtgaaactgttgttgaagttcccaatgtttcttgggaagatattggtgggcttgagaatgtcaaaagggagttgcaggagactgttcaataccctgtggagcatccggagaaatctgagaagtttggcatgtctcctt

SEQ ID NO: 9351 - DNA, 425 bp, Triticum aestivum
  unsure (1)..(425): unsure at all n locations
  Clone ID: uC-tsrow189068a07b1
tttcgcttacccgtcccgcccgccactccnggagtccggggttaacttaaacctgggccggggcacacaaccagccgtcaagccacgccgccgctcgccccagcgatgccgccaccctccctcctgctcttccactgccgcgccccgctcccgcaccgcccgctgcggatgagctctccgtcgccgagcaggagggtcgtctgctccgcctccaccgccgaggggtacatctccgcggcgccgatcctccttccagacgggccatggaagcaggtagaaggcggcgtcacggcggcgaaggggtttaaggccgcgggcatctacggcggcctgcgcgccaagggacagaagcctgacttggcgcttgttgcttgcgacgtcaacgccaccgtcgccggatcttttacaacaaatgttgttgctgc

SEQ ID NO: 9352 - DNA, 104 bp, Triticum aestivum
  Clone ID: uC-tsrow189068a08b1
ctttacgcgtgggtgatgtgtgggttcagggagggtgtaacattaactgggtgagagggtaagggacctatcctatatgtatgtctaaaatagtaacatgtaac

SEQ ID NO: 9353 - DNA, 295 bp, Triticum aestivum
  Clone ID: uC-tsrow189068a09b1
tcgttttacctctcatcctcccacttcctttggtcgggcttaacttagcacaccgtgccgggctccatcgccttcggtcgcttcgatgactccttcagcttggcctctttcagggcctacatcgccgagttcatctccaccctcatcttcgtcttcgccggcgtcggctctgtcatcgcctacaccaaggtgagcggcggcgcgccgcttgacccatccgggctgatcgccgtggcgatttgccacgggtttgggctgttcgtcgcggtcgccatcggcgccaacatctccggcg

SEQ ID NO: 9354 - DNA, 354 bp, Triticum aestivum
  Clone ID: uC-tsrow189068a10b1
ttcagcacctgcctcaccctatacaatgagacggggctatttgacaagctgggcgggttcccggcgccgctgctgatgaacactgtgcacttcgcgctgcaggccgcgctctccaagatcatcctgctcttccaggccaaggggatcgacaccgccgtcgagatgagctggaaggattacttcatgagagtcgtcccaaccgctctgggaaccgcgctcgacataaacctgagcaacgcgtctctggtgttcatcacggtcacgttcgccactatgtgtaaatcggcgtcgccaatattccttttgctattcgcttttgcattccggttggagagccccagcatcaagcttcta

SEQ ID NO: 9355 - DNA, 411 bp, Triticum aestivum
  Clone ID: uC-tsrow189068a11b1
ttctatacctgtttatgatactccactgggaaaggtaaattcaacatgggctgggagaacagaatgccacttatcaggacagcgatgtatgccaaaggtgttcaaatatactgtgctcccactgcggatgcgctgccaagttggcaggcttccatgacacacattgcgcttgaagggggatgctttgttctgacagcaaaccagttctgccgcagaaaagactttcctcccccgcctgagtatacctttggtggccatgaggaggagccatccccagaaaccgctgtttgtcctggagggagcgccatcatctcgccatctgggacagtgttggcaggtcccaactatgaaggcgaggccctcctcacagctgacctggaccttggagaaattgttcgagccaagtttgat

SEQ ID NO: 9356 - DNA, 349 bp, Triticum aestivum
  Clone ID: uC-tsrow189068a12b1
aaatggtagaccggttcaagcttggagcaggagcaatgcctgcaagtttcaaggtggaccgtaatgtgaacaggaacactgaaacattagttgcagattttggtgagagcgcaattggcagggtggcaccagtggactctggattttggtggattattctcctccgggcgtatacaaaatatactggagatgctagtttatcagaatcacctgattgtcagaagtgcatgcggcttatactgaatctttgcttatctgagggattcgatactttcccaactctgctctgcactgatggttgctcaatgattgatcgtcgaatgggtatatacggttatcctattgagat

SEQ ID NO: 9357 - DNA, 281 bp, Triticum aestivum
  unsure (1)..(281): unsure at all n locations
  Clone ID: uC-tsrow189068b01b1
acttaagcttatcttcttctccttgaaatctttgggggtcgtcaaatttagagggtggcttggaactgcggatcangctgcagctgcggctcagactgcaagtgcgggaagatgtaccctgatctgacggagcagggcagcgccgccgccgaggtcgccgccgtggtcgtcctcggcgtggcgcctgagaacaaggcgggacagttcgaggtggccgccgggcagtccggcgagggctgcagctgcggcgacaactgcaagtgcaacccctgcaactgtta

SEQ ID NO: 9358 - DNA, 293 bp, Triticum aestivum
  Clone ID: uC-tsrow189068b02b1
ggttaagctacgcataccactacttcacttactgggtcggggaaaacttgcaagtgagcatgggctgcagacacgacatgcacggcggccacaacggcggcgtgaagggcttcgtgtccaacctcgtcggcggcggcaaaagccacgggtacggcggccaggggcacggctgcgaccagggctacggcggccacgggcagcagcagcacgggtacggcggccacgggcagcacgggtaccctccgcccgccggcggggcttgccccccgtacggcggctacccggcgcaaggc

SEQ ID NO: 9359 - DNA, 247 bp, Triticum aestivum
  Clone ID: uC-tsrow189068b03b1
gttgagtcttgtagccgagagcaaagcaagcatcagagagggagagataagcaagggtagcggggggagaggagaaaggagaagcgggccaggatgtgtggcggagcgatcctcgccgagctcatcccggggggcgcgccggcgcggcgcgccgcgtccggccacgtctggccgggcaaggccgccgacgacttcgaggccgcgttccgggacttcaacgaggaggaggacgtggtggtggtggtgg

SEQ ID NO: 9360 - DNA, 224 bp, Triticum aestivum
  Clone ID: uC-tsrow189068b04b1
cgcaattggttctaacggttctggcagcaagtcatgctgcccgctgtcggactaccgcattccagattacatactaaagccggactctgaaccagtcatccttgacaatgcaccatcttgtcccgtggtagtcttcatcaactctagaagcggtggccaacttggaagtggtttgatcaaatcataccgtgaagttctcaatgaagcacaggtctttgatctgt

SEQ ID NO: 9361 - DNA, 383 bp, Triticum aestivum
  Clone ID: uC-tsrow189068b05b1
gttacttatctaggtaaccaaggcaggcaacatggacaagggaaattttaaggtgggagggtgctcactagcactaccactttgaaggtgatcatgtgcctgctcatcctgagcctcaccgtaaactcgaccaccgcagactgcggctgctgcataagcttagccgcaaaaggatgttgttctacttgtatttttgcgggtggctctgactttgcctgcaagaacacttgttgtttcccctgtattcttgaagattctgtggttgctaagatggatgaaatgggagtggcttcgaagatggaaggactgtactaaaacgatatgcttgcattgctaccaacatggatgccattcatcggcatatgttggattgcttcgatcta

SEQ ID NO: 9362 - DNA, 453 bp, Triticum aestivum
  Clone ID: uC-tsrow189068b07b1
cctccccgcgccggcgcgcccccggagagcggaggtggatcctggcctgggcatggatccggagtatgactatctctttaagcttctgcttatcggagactcaggtgttggcaagtcatgccttctcttaagatttgccgatgactcatacctggagagttatatcagtactattggtgttgatttcaaaatacgtaccgtggagcaagatggaaagactatgaagctgcaaatctgggacactgctgggcaagaacgcttcagaactattactagcagctactatcgaggggctcacgggatcattattgtctatgacgtgacagaccaggacagcttcaacaatgtgaagcagtggttgaacgagattgatcgctatgctagtgagaatgttaacaagcttcttgtagggaacaaatctgatctcactgacaaaagagttgtatcatatga

SEQ ID NO: 9363 - DNA, 416 bp, Triticum aestivum
  Clone ID: uC-tsrow189068b08b1
gtttccggcctcagagggtatgtaaatggggccgagttccttttgaaaatcacaggtggggacaacgaggacctgaggaccgaggctttggagggctgcctcgtgtcctacgccaaggccaccctccccgggctgtcgaggtccatgaggtggcgccgcgcgtccgcgccggtgtcgtcggaggtggagcagagagacctcctggaggcggtggtcgccagcctcccggcggacaagggctcggggagcgtggtgaccgcgaagttcctgttcgcgctgctgcggacggcgcacatcctgcgcgcttcggacgcggcgcgcgccgcgatcgagcggaaggccgcgacgcagctggaacaggcaacggtggaggacgtgctcatcccgagctactccggcgccgcggagacgctcta

SEQ ID NO: 9364 - DNA, 241 bp, Triticum aestivum
  Clone ID: uC-tsrow189068b11b1
ctggtcgaaccagacctggcggaagaccttgacgatgcaatcgtagtgctcgtcggcgttgaaggcgaggtaacacgccagcagccgctccagctcctccggccgggcgtcggtccccccgctgctcgcgatcatctcggacatcgactccctgaacgcccgctgcgggtcccgcgtccgccgcaccactgagaggctctccagctccggcgccgaccgccgcggcgaccgcaccttcacc

SEQ ID NO: 9365 - DNA, 329 bp, Triticum aestivum
  Clone ID: uC-tsrow189068b12b1
cttctcttcctccgccccgccccgccgtgccgtgcgaggattggagaggagaggagaccaaggagatttgccgttttttctcttcacgacgcagccgctgccgctgcgaggaaacaaaacaatcccgtgaggcaaggacggttgtgaagcaaaggggtgacaaagccttctgcagcatggagtgcagggagaacttcatggaagatgagatggaaggtgaaccttcgataggtcactctgatcccagctgcccatcctttgacaatcgtcgcattttccaactgatccagtgaccagcgagcatcagtaaacacttgatgtggtcgtat

SEQ ID NO: 9366 - DNA, 376 bp, Triticum aestivum
  Clone ID: uC-tsrow189068c01b1
cctatcccatcgccgatcgccttcgccccaccctgaaaccgttcaaactccaacgggggtccgatggccaaccagccccgcgaacgcgggtcccgcgccgcgcgcaagggccgccccgtccgcacgccagcgaccctgctcgcccttaaccccacccccgatcccgatctgtccgcgcaggcctctgacgacgtctctccgtggggccgctcgacggcggacgagctggaggaccgcctcctcaagaggctggaggaggcctacgcggcggcgctggccggcctcgctgagctcggctacgccgaggactccgcgctccgggccgtcctccgcgcgggccactgctacggcaagcttgacgaccctgtcgataaca

SEQ ID NO: 9367 - DNA, 466 bp, Triticum aestivum
  Clone ID: uC-tsrow189068c02b1
ggttccactcccctccccattcctacccacccagcatctgggcagtaactctcctccctcccacgcggcgcgcccgctcgccgcgcgcgcgaatctcggtcgcaactggtgtactgttgaaggaaggaaaaatcatcctatttgtcatggcgggaactgactcctcggcgtcatcgagacaaagcagtttcaactcattagcaaaggacctagaacttcctttggagcaagggtgcctcaccatcgttgtacttggggcttctggagatcttgccaagaagaaaacgttcccggcactctaccacctttttgagcaggggttcttacaatctggtgaagtgcatatagtggggtatgcgagaacaaatctttctgatgatgggttgagagggcgcatccgtgcataccttaaaggagcctcagaggaacatgtttcagaattcttgcaattgataaaatatgtcag

SEQ ID NO: 9368 - DNA, 381 bp, Triticum aestivum
  Clone ID: uC-tsrow189068c03b1
acttcttgtttgaggtatccgttcgaacatatttcccaggtgccgtcttaaccattttgctggagcacaaagataccaggatgtaaagaaagttctcgcagacacattctttggtcctcctgaagttggtgtatatagcccatcagtgcagaatacattatacctcatggctagggaagttcttaccaggttcccagacatagcgtcagttcagcttaggatgccaaacctccactttctcccggtgaacctatcagggaaagaaaatccaggattggtgaagtttgctgatgatgtgtacatgccaactgatgaaccacatggaaccattgaagcaacactgagccgcgccaactcaaagctgtaatattttatttttct

SEQ ID NO: 9369 - DNA, 416 bp, Triticum aestivum
  Clone ID: uC-tsrow189068c04b1
gttatttgtttccagtgaagaacgcgaatggctcagcctgggacaccttcaatagcgccaaagtgatgctgctccgactccacagcagatgggtagtcgctgctggcggcttcctgacccattctgtgcccttgtacatgacaggcgtcgaggtttctccgctcagctcctacgccggagaaaacctggaggcgatctgccgcggacggacattccacgcgcccagcgagatctcgttctaggcgcatcagttcacgacagtggcagcaaatggaggaagcagtattgcacagggattgcaaggtcgaacgaatgctcgcagttgacattggttgtattgagctgagctctttgagctattggcattagggttttcaggtactgggcagactgttgtatcttttgtgagtaaattg

SEQ ID NO: 9370 - DNA, 357 bp, Triticum aestivum
  Clone ID: uC-tsrow189068c06b1
atttcgctttgcatcggtcgatcggttcctcctgccttgggcatcctttaacaagatcatgggcaggcacctccccccagggatcgatcgaagatgcctaatatagcgctggaccaccgccgcgaggcgtcggaccccggctgcctccgggccgtgctcggcgagctcgtcctcaccttcctcttcgtcttcgtcggcgtcggctccgccatcgtcggaggacaagcagtcgcagccggaggcgacacgtcagcggcgttgatcgcggtggcgctgggccatgcgctggtggtggcggtgttcgcgaccgcagggttccacatctccggcgcccacatgaacccggccgtcacgctc

SEQ ID NO: 9371 - DNA, 413 bp, Triticum aestivum
  Clone ID: uC-tsrow189068c07b1
tcggtttgtacgaggcacacctctgggacaggaccagccaggttgaggggcgcaagcgcaagggcaagcatgtgtacttgggaagctatgttactgaagagaatgctgcaagggcacatgaccttgcagccctgaaatattggggcataactcaacccaccaaactaaacttcaatatttctgattatgcaaaagaaattgagatcatgaagagcatgaatcaagatgaatttgtggcctacataaggaggcagagtagttgtttctcaagaggaacatcgtcatacaggggtgtaacaagacgaaaggatggtaaatggcaagcacgtattggtaggattggtgagagtagagacactaaagacatctatcttgggacctttgaaactgaagtggaggcagctgaagcgtat

SEQ ID NO: 9372 - DNA, 454 bp, Triticum aestivum
  Clone ID: uC-tsrow189068c08b1
gttgcaaggtgcagctgaagcggatagagaacagggtaaattggcaggtgaccttgtgcaagcgccgcaacgggctcctgaagaaggcgcacgagatctccgtcctctgtgacgcggaggtcgccgtcatcgtcttctcccccaaaggcaagctctatgagtacgccaccgactccagcatggacaaaattcttgaacgttatgagcgctactcttatgctgaaaaggctcttatttcagctgaatctgaaagtgagggaaattggtgccacgaatacaggaaacttaaggcgaagattgagaccatacaaaaatgtcacaagcacctcatgggagaggatctggattctctgaatctcaaagaactccaacagctggagcagcagctggagagttcattgaagcacatccgatcgagaaagagccatcttatgatggagtccatttctgagct

SEQ ID NO: 9373 - DNA, 400 bp, Triticum aestivum
  Clone ID: uC-tsrow189068c09b1
tttcgcttttcctccccttccggttcgggttggggttcggttcaagttcggttggggagagaggccgagtagctagcctagtctagggtttcggtagagaggaagtgagatccatggcggagacggagtaccgctgcttcgtgggcggcctcgcctgggccaccgacgacaacaacctccagcaggccttcagccagtacggcgagatcctcgacgccaagatcatcaacgaccgcgagacggggaggtcccgtgggttcggcttcgtcacgttcggcagcgaggagtcgatgcgccaggccatcgaggagatgaacggcaaggagctcgacgggcgcaacatcaccgtcaacgaggcccagtcccgccgctccggcggtgggggcggcggcggcggcta

SEQ ID NO: 9374 - DNA, 478 bp, Triticum aestivum
  Clone ID: uC-tsrow189068c11b1
cttagccagcagaggagaaagcttggctcacctgtgcacttttagagccatggggggcaagcacctgtgcctggtgaggttcaaggagggcgtggtggtggaggacatcattgaggagctcaccaagctcgccgcggagctcgacaccgtcaaattcttcgggtggggaaaggacgtgctgaaccaggaggcgctgacgcagggcttcacccacgtcttctccatgagcttcgccagcgccgaggacctggcggcgtacatgggccacgagaagcactctgcgttcgccgccaccttcatggccgtgctcgacaaggtggttgtcctggacttccccttcgtcgtcgccaagccggtgccatcgcctgaggccgcttgaatgatacaccccaccccagtatctatctgttactacttcctccgtctaaaaaagcttgaatgatatatacaccccaccccactgtctatctgttactac

SEQ ID NO: 9375 - DNA, 477 bp, Triticum aestivum
  unsure (1)..(477): unsure at all n locations
  Clone ID: uC-tsrow189068c12b1
ctttacgcgtccggcgcaaatggggtcgggatctgttcacattgaaactcggcagggggctanacaatctcgccgggcccatagtttcactcgcttatcctctgtatgcgtctgttcgagcaatagaaacaaaatctcctattgatgatcagcaatggctcacttactgggtgctgtactcgtttatcactctgtttgagctcacttttgctgcagtaattgaatggctccctttctggtcttatggaaagctgtttttcaattgctggttggtcttgccctactttaacggtgctgcgcatgtttatgagcattttgtgcggccaatgattgtgaaccagcaggttgtaaacatctggtatcttccaaaaaaggaaggttcagacaaacctgacgatgtaatttcagctgcacagaaatacattgaacaaaatggatcaaaagcatttgagactctcgttaacaagtttaagacta

SEQ ID NO: 9376 - DNA, 393 bp, Triticum aestivum
  unsure (1)..(393): unsure at all n locations
  Clone ID: uC-tsrow189068d01b1
gttgcacctccgcaccgcaccccatctccatcggganccggttgaaatccccaccgggaacggatcgaacggccggcctacccaccccacccccctacccgtcagcctagggttttgagtccgacgcctccgcctccgccgcgcaccatgggccccgacgagctccccaaggccgccgccgccggtgccgacgagatttccccgttctccttcagcatctggccgccgacgcagcggacgcgggacgccgtggtgcggcgcctggtggacaccctggccggcgacaccctcctctgcaagcgctacggcgccgtgccggccgccgacgccgagcccgccgcgcgcgccatcgaggccgaggccttcgacgccgccgccgtcaccggcggggcc

SEQ ID NO: 9377 - DNA, 263 bp, Triticum aestivum
  Clone ID: uC-tsrow189068d02b1
ctttcgcgttcgatcccatcccgcaccgcacgacagacagacagcactaggaaggcgagccagccacccaccaccgccgagagactagcaccacgagcgagctcggccgattccgattccgtctgcgctattaaggtttgtttggaggaaggggaggagtctctgaggtggagctgaggagagagaccggagatggcggcttccgcgaggcaaggggagagggcgaccagcttcgccatggcctgcagcctgctcagccgcta

SEQ ID NO: 9378 - DNA, 384 bp, Triticum aestivum
  Clone ID: uC-tsrow189068d03b1
cctacgcgttcgtatcttccttgattagttttgtaagctgggcatcattgatggagtactcggcgaagctagtggtgctgctcgtagctctcatgtcggccatggcggtcacggcccaaaactcggagcaggacttcgtggacgcccacaacgcggcgcgcgccgacgtgggccttggggaggtgacatgggacgctacggtggcagccttcgcgcaggactacgcggatcagcgccgcggcgactgccagctgatccatactcctgatggccggccgtacggggagaacctctacggaggcggcgggaccgagtggacggcgacggacgccgtgaattcgtgggtgtcggagaagcagtactacgaccacgacagcaacacct

SEQ ID NO: 9379 - DNA, 450 bp, Triticum aestivum
  Clone ID: uC-tsrow189068d04b1
cttgcccataatcgcgaggcagcacgaaaaagtcgtctgaggaaaatggcgtatgtacaacaacttgagagcagtaagctaaaacttgcaagcctggaacaagaactccagaaagctcgacagcaaggaatcttcatttctagctctggggatcaaactcatgctatgagtggaaatggagcgatgacatttgatttagaatatactcgatggctagaggagcaaaataagcagataaatgagctgaggactgcagtaaatgctcatgcaagtgatagtgacctccgtcttattgtagatggaataatggcacattatgacgaaatattcaagctgaagggcgctgctgcaaaggctgatgtgtttcatatactttcaggcatgtggaaaacacctgctgaaaggtgttttttgtggcttgggggtttcgttcgtctgagcttttaaagc

SEQ ID NO: 9380 - DNA, 441 bp, Triticum aestivum
  Clone ID: uC-tsrow189068d05b1
attagactttgatgtgctccttccaaatactcagggctggtttgaatatgatgccgggttggactaataacaagtctggcttcaagtcaatgagaggatggtgacggtggcatggcgattggtgagcaagctgtggtctcatttgctggcaggcacatgcctaccactagcggctgcgactaaccggcattttcgccgatgcctccagcccggaccggaacaagaacgcagattgtacaactctctcgtcgatggactgtacatcgttcatgtcggattaacactcgtggtaatgtattatagtttttctaccgcgcggatctctttatcgtacgagaggaccatgtgaatgaaactgttgctcctcctttcccccctctaaattcaaaggattcaagcaggcatatacgccaataaaaactggtaagagtcttgggtgct

SEQ ID NO: 9381 - DNA, 443 bp, Triticum aestivum
  Clone ID: uC-tsrow189068d06b1
atttaggtttgttccaaggttccaagagttgactaccggggggcttttgaaggctggatggggcacagagaagtcatttggaacaacaaaagatcggatgctatacatcgagaagtgtgccaattccaaagctgtaactattttcatccgtggtggcaacaaaatgatgattgaggagaccaagcgaactattcatgatgctctatgtgatgcaaggaatctgatcatcaacaactcaattgtgtatggtggtggctcaccagaaatatcttgctcaattgctgttgatgctgcagcagatcggcatcctgaagttgagcagtatgcaatcagggcatttgctgatgctttggatgccattccactagctttagctgaaaacagtggtttgccgtctattgatactctcactgtcgtaaaatcccaacatgtcaaggagaaca

SEQ ID NO: 9382 - DNA, 302 bp, Triticum aestivum
  Clone ID: uC-tsrow189068d07b1
gccacccccgctcctctcctctcgcccatgcccgccaccgccgaagaagctgccatggcggccggcgacacgggcgcgcccgcggcgggcggagcggggaaggacggcgagcccgagtcgccgcgggagccggaccccgatcaccacgctccggtgtcgccgggcgcttccgaagaggaagagggcgccagcggcgcggtcgaggcggggcaggacgacgacgcgcctgacccggaggacgagccggaggagggcggtgacgccacggaggacgatatggacgaggaggaggaggaggagga

SEQ ID NO: 9383 - DNA, 422 bp, Triticum aestivum
  Clone ID: uC-tsrow189068d08b1
tcgctttcctccactctcgatcgccggctcgtccaggggccgccttcaaagagaagccgggaatgctgctctcaccgtcgccgtagccggggaagaaatcgacgaggccgtagccggggaagaaatcgacgaggccgcctctcgggctcaggctgacatgtcggagatcatgtcgtcgctcccacggtgcccggtgtaccttactcaccactaccgcggcttctggatccgcgagttcgtcctcaagggcatggccgccgctcaggcatccttcgagccaaggccaaccgacgtcttcctcgccagctgccccaagtccggcaccacctggctcaaggcgctcgcctttgcgacgctcaaccgcgccacgcacttgccgtgcgactccaaccacccgctatgccaccgcaacccgcacgact

SEQ ID NO: 9384 - DNA, 496 bp, Triticum aestivum
  unsure (1)..(496): unsure at all n locations
  Clone ID: uC-tsrow189068d10b1
tttcgattgcccccttccattcctcccctccttgtccccaccctctctctctctctctccgtccgtctgtccgtccgcgcgcgctctgcgttctttgggaggggggaaatggcggcgaagcgcgagctggtggtcagcttcggggagatgctgatagacttcgtgccgacggtggccggggtgtcgctggcggaggcgccggccttcgtcaaggcgcccgggggcgcccctgccaacgtcgccatcgccgtcgcgcgcctcggcggcgccgccgccttcgtcggcaagctcggcgacgacgagttcggccgcatgctcgccaacatcctccgcgacaacggcgtcgacgccggcggcgtcgtcttcgactcgggcgcgcgcaccgcgctcgccttcgtcacgctgcgcgccgacggngagcgcgagttcatgttctaccgcaaccccagcgccgacatgctcctcaccgccgacgagctcaaggtcgacgtcatca

SEQ ID NO: 9385 - DNA, 475 bp, Triticum aestivum
  Clone ID: uC-tsrow189068d11b1
cttacgcgtccggcgcaaatggggtccggatctgtcctcattgaaactcgtcaggggcctggacattctcgccgggcccatagtttcactcgcttatcctctgtatgcgtctgttcgagcaatagaaacaaaatctcctattgatgatcagcaatggctcacttactgggtgctgtactcgtttatcactctgtttgagctcacttttgctgcagtaattgaatggctccctttctggtcttatggaaagctgtttttcaattgctggttggtcttgccctactttaacggtgctgcgcatgtttatgagcattttgtgcggccaatgattgtgaaccagcaggttgtaaacatctggtatcttccaaaaaaggaaggttcagacaaacctgacgatgtaatttcagctgcacagaaatacattgaacaaaatggatcaaaagcatttgagactctcgttaacaagtttaagact

SEQ ID NO: 9386 - DNA, 393 bp, Triticum aestivum
  Clone ID: uC-tsrow189068d12b1
gtctcgccctttttttttttttttttgcaggtaaggtattcttacagtttcagtaggggtttcagacatggacagagcataactaatccagcgcccactgaaatcagaacgtcacagcctcatcctttctacataatcttacccttacattttgaacttgtcaaaagtacccagtagcataaactacaagcacaatgcccgccgacgactaacaacgaccaagatttgcagcaagtccagcccgccttgcttctcagttgggcttttcctcctggcacttggagcaggtacacgtgaacccgtagtccgcgagctccgcctgccgctcctcgtagggaagttcttcgtcgatgtaggagatgggtgatctcttcgcccttgctgataggcccc

SEQ ID NO: 9387 - DNA, 332 bp, Triticum aestivum
  unsure (1)..(332): unsure at all n locations
  Clone ID: uC-tsrow189068e01b1
ctttgcgttcggtcttcttggaccctgcttctntggcgtcctcaacgctgcgagcggctatcgacaatcttttctccgttcaagatgaccatcatcatcgagcagcctcagtttgatgcggcggcggagaggaaggtcgccggcgaccagggggagctcgtgctcgacggcggcttcaccgtgccggactccaacgccttcggccacaccttcagggactacgacgcggagtcggagcggaagaagacggtggaggagttctaccgcgtgaaccacatcaaccagacgtacgagtttgtgcagcggatgcgggatgcatatgggcggctgga

SEQ ID NO: 9388 - DNA, 471 bp, Triticum aestivum
  Clone ID: uC-tsrow189068e02b1
tttaccgttaaatatttttatgtctactgttacaaaagttgcaatgcattagtctcccggtgatgtgcgatccactaagcactttatatatagaaaaaaaaagaggaagaaaaaggtacgtggcgcctgcttgctctcatagtaaaacgagcaataagccaagcgaatcaacgagcggactttatgtgcgaaaatgaccgtacgcagctagctaacataatatcgaatctgacgtaactggcgagtactatctaggtagcggctataatatcgcaggccagcgcccagtgataccactattatggcacacgcatatataccagatagaggacgatgccccgcaacggccgggggtccatgtatccactgccgtactccggattaactaggtttagtaactggtatagcactggagcacgtaccaaccagctcaccggtcatcatgtcttaagccaatgcaatatactcact

SEQ ID NO: 9389 - DNA, 473 bp, Triticum aestivum
  Clone ID: uC-tsrow189068e03b1
tgttagcattgatatagctttcaattggacaggagcacagggtgtctttacacctcctttggggtgcagtgataaatccacattacgcttttctatctgggggttttcgaactatgccacccgtcacgtatttgacacccaacttccgttattggaggggatcaatcgtatacaaattccgattcatcaaaacggcctttcataaaggtcgtgttttgatttctcacgatcccaacggagatattactggtacatcagataccgagaccacaactttttcgcgagtagtgcatttggagcaggaaactgaactagaatttgcagtcccctacaaggcaacatcgcctatgttggagattgttgattttgcctcttttccccttaccaattccacctcagcagcacctgcttacgtgtacaattcacgttggtataatggtactattaccatgcgcattcagaccaatctcaca

SEQ ID NO: 9390 - DNA, 297 bp, Triticum aestivum
  Clone ID: uC-tsrow189068e04b1
cttgttttttcattgcttgtgcaccatgcacctagatgaggggcctcttaggggttttgtgggagagactgacaaaaacagtgaaaacaagcactatctttacacgcacaaaatcattattgtaaagtacaacgataacaggataattcatgttaatctcacccaagagtctcctaagctccttgacgctggtaagaacttggacatgacatattcaacgaagtgggtaccaacagatgtttcatttgcacgccgttttgaagtttacctggactatactttctttgaacaccagat

SEQ ID NO: 9391 - DNA, 453 bp, Triticum aestivum
  Clone ID: uC-tsrow189068e05b1
ctttgcgtttgcgctgctggagaaggaggaggacttccggggcgcctttgaagaggcggagggggaggcaaagaagtgtggctccaagaggaaggtggagttggagcgggatgaggagggggcagcgttcctggcgtggatcgagtccaccaagccaccgacagaccaagtggattactctgatggggatgtgtcggacggctaccactcggaggacgacgccatcggcagcgacagcagggacaatgatcggtatgagcgccgcgttcaggccaacaacactcgctggcctttcttggtgggggcctaatcccatccatgacggtgctcttgctcttgtggtctgagaagctgacgaggagctttaccaatcctatcccatctagtaccaaccatgtatctatcttatctatctatatattactagatgatcctgtggacatatatatatgt

SEQ ID NO: 9392 - DNA, 509 bp, Triticum aestivum
  Clone ID: uC-tsrow189068e08b1
tcgcctcgcgtccgctcaacttacatccacgagcccgggtactttaaggacatgaccatgtccccgcctggcccacacgcggtgaagaacgcctactgcttgctcaactttggagacagcattaccacggatcatatttcacccgcaggcagcatccacagggacagtcctgctgccaagtatttgcttgagcgtggcgtggaccggaaagacttcaactcgtatggtagccggcgcggtaacgatgaggtgatggcaagaggaacatttgcaaacatcaggattgtgaacaagtttttgggtggagaggttgggcccaagactattcatgtgcccacaggggagaagctctctgttttcgatgcagccacgaaatacaagtctgaaggtcatgatacgatcattcttgctggcgccgagtatgggagtggcagctctcgtgattgggccgccaagggaccaatgcttctcggtgtgaaagcggtgatttccaagagctttgagcggat

SEQ ID NO: 9393 - DNA, 418 bp, Triticum aestivum
  Clone ID: uC-tsrow189068e09b1
tttcgatttgagtgctcgctgctccctcctcggggtccgggaagattctacttcggcccctgccgatctccaaggcgacgtcgccgtcgccgtcgccacgcgccagatctcctccacgcgctcgcggtgcgccttcgccgcctgcgcgatctgcccggctaagatggcgacctatgagcccaagaacatcctcataactggtgctgcgggtttcattgcatcccatgtggcgaaccgtctaattaggagctatcctcactacaagattgtggtactcgacaagattgactactgctccaacctgaaaaatctcaacccctcccggccatcgacaaatttcaagtttgtcaagggcgacatcgcaagtgctgacctggtgaactatcttctcatcactgagtcgatcgacaccatcatg

SEQ ID NO: 9394 - DNA, 464 bp, Triticum aestivum
  Clone ID: uC-tsrow189068e10b1
tcgctcacgcgtccggtcaacttcctcgtcgccaccacacgaccgcacctctcccatggcgtcctcctcgccgccgcacgtcgtggaggacgtgcccccgttcctgcagctcctcagcgacggcacggtgatccgcttcacggacggctacccgctcccgatcccgtcgccgccgcccggccagcccgtcgtcgactggaaggacgtcgtgtacgacgccagccacggcctcaagctccgcatctacaggccggcggcggcctcctcctccgggaacaagctcccggtgatcgtctacttccacggcggcgggtacagcatcggcagcttcgacatgcccaacttccacgcgtgctgcgtccgcctcgccggcgagctcccggctgtggtgctctctgcagactaccgcctcgcccccgagcaccggttccccgcgggcctcgacgacgcggcgaacgtcgtgt

SEQ ID NO: 9395 - DNA, 472 bp, Triticum aestivum
  Clone ID: uC-tsrow189068e11b1
tttcgcttacgcgtccgcggacgcgtgggtcacaattagaacacttgaattctttacggttttctttcatatcaatcatattcatgtctaacatttgcttgtgagctctgatacatgctctcttacttcaacaataactctacagaaaaataatgtgtccaatcaaagagaacatctcatactcttgattggcagcatacatataaggcagatctccaaacatgaacaacacccaaagttagatgaccatgtgttggatacaacaatgaacaagctattcaagaactacaagagatggtgcaagcaccttggccgcaaaactagcttatggttgccggcaattcaacaagaagtacaacagcggaagcttctctatatgggcctttatctgctcatatggggcgaggcggctaacttgtggtttatgccggagtgtctttgctacctctatcatcatatggcttttgaattg

SEQ ID NO: 9396 - DNA, 285 bp, Triticum aestivum
  Clone ID: uC-tsrow189068e12b1
tttcatttcaaggttactgcaaagtgtcgccttggtctcattgaaaactgcctggggatggaccatcaacgacaacgcaagtcgtctctgaatataatctagcactcttaagtacaactaattatgctctatgatgtgatgaacctacagtctacttttggacactgctatcaggtacttttgaagatccaacacctatgtcgttgcctatgtaaactctgctgttgtcactttccataatgacactcttgtgtacaactatttatttctattgctattctcttc

SEQ ID NO: 9397 - DNA, 319 bp, Triticum aestivum
  Clone ID: uC-tsrow189068f01b1
cctacgcgtccgcccacgcgtccgcggcacgctggccccctgtgacgccgccggcggaacggcgtcgccttctgcggcacgctcgccggccagctcttcttcggctggctcggcgataagatgggccgcaagagcgtctacggcatgacgctgattctcatggtcatctgctccatcggctccggcctctccttcgcgcacacccccaagagcgtcatggccacgctctgcttcttccgcttctggctcggcttcggcatcggcggcgactacccgctctccgccaccatcatgtccgagtacgccaacaagaagaccc

SEQ ID NO: 9398 - DNA, 394 bp, Triticum aestivum
  Clone ID: uC-tsrow189068f02b1
cattcacttgcacagcacacaaaacaagtctcgtggtatagagaaacggagctaaggaagctagccagctcgaccatgggtggtgttcggcagcagctcatggccgccgtcctcgtggcggtggcgctgatggccacggcggcggaggggtacatcactcagaagacgtggggcgccatccgccgggcgaaccgcgccgggccgttcgtcggcctcgtcgtgcccaacacatacgagatggtccccgtgctcgagtcgcccagcttcgtggccagcaagagcatccctaacatggacatccaagggcgaaggtttcgcttcggaaccatcgaaagccaaagcgtcgtcatggtcatgactggactgagcatgctcaacgctggtctgaccaccc

SEQ ID NO: 9399 - DNA, 344 bp, Triticum aestivum
  Clone ID: uC-tsrow189068f03b1
cttacgcctcaaacagaaataggaagacgagagaacagaagagccaaagacactaaaacgaaatggcatcctcctcttcctttctcctccttgctgcacttcttgcgttagtctcatggcaggccactgcttctgatcctagcccactccaggacttttgtgtcgccgacatgaattcaccagtccgtgtcaatgggtttgtttgcaagaacccgatggaggtcaatgcagatgacttcttcaaggcggccaacctcgacaagcctagggtgcccaacaaggttggatccaacgtcactttgatcaacgtcatgcagattgctggactgaacaccctcggcata

SEQ ID NO: 9400 - DNA, 378 bp, Triticum aestivum
  Clone ID: uC-tsrow189068f04b1
cttacgcgttcgcggacgcgtgggcgacgccgcccgggagggcgcctttgacgaggacatgggcaaggtcggggagtcgctctttgggccctatgagtgggagagattcgatctgctggtgctgccgcccagtttcccctacggcggcatggagaaccccaggatggtgttcctcacgcccacggtgatcaaaggggacgctgcggcgcacgtggtggcccatgagctcgcacatagctggactggaaacctcatcaccaacaaaaccaacgaggacttctggctaaatgagggtttcacaacatatgctgagaggaggattgtcaaggtggttcaaggtgaggagcgggcggccttaaacagcggaattggatggag

SEQ ID NO: 9401 - DNA, 469 bp, Triticum aestivum
  Clone ID: uC-tsrow189068f05b1
cctcgcgttcgcccacgcgtccgctgggatccatgatgactgcaagctgaggtttgtggagctcaagtccaagaggatgcaccgcttcataacctacaggctggagaaccagaaggaggtcattgtggaccaaactggggagcgcgaggccacctatgaggagttcaccaagaccctccctgagaatgactgccgattcgcggtgttcgacttcgacttcaccaccccggaggatgtgccaaagagcaggatcttctatatcttctggtccccggacaccgcaaaggtgaggagcaagatgacgtacgcgagcaccaacgagaagttcaagaggaccctggacggcatccaaatcgagatgcaggccactgaccccagcgaaatcagcctggacgtgatcaaggagcgcgcgcactaaggcaaatcatcccaatgcctcgcaatatggatttatgtcaaatatagattt

SEQ ID NO: 9402 - DNA, 347 bp, Triticum aestivum
  Clone ID: uC-tsrow189068f08b1
cttacccccatgtccgacggcggcggcggcgagcccggtgccggcggctcggcgccggtgtgtaactttgtccggaagccgccgaagaatatccggaagcgtcccgccgcgtccgtcggctctgacggcgaagaaggtagcggcggcgacgattccggggccatcgcggcggcgcgatctaagaagccgccgtctactaccagcaagctcttcttctcctccgccgacaactcacacgagccccgccgtttccagttcgagtcgtcccggacgattcagtcctccaccgacaaccgcgccactgcgacgctcgagacggagacggcgtacgaccgtgatgcgcgcgc

SEQ ID NO: 9403 - DNA, 203 bp, Triticum aestivum
  Clone ID: uC-tsrow189068f09b1
atttgagtgctcgctgctccctcctcgggggccctttaaattctccttcgggccctcccaatctccaacgcgacaggcgccgtcgcccacgccacgcgccacatctggtccacacgctcgcggtgcgccttcgccgcctgcccgatgtcaccgggtaagatggcgacctatgagcccaagaacatcctcataactggtgctgc

SEQ ID NO: 9404 - DNA, 443 bp, Triticum aestivum
  Clone ID: uC-tsrow189068f10b1
cgctatcacagcacaaacaacggcggggagggcgacacgatggcggcctgcctccgctgccgccgccgcctccccctctcccctccggcggcgccgctggaagacgacggcctgctctctgagaacctcctccgcctccccccgcagccctcctccctcccgcgcgcctccgccgtctgcagccgcctcctctccgaccccgccttccgccgccgcttccgcatccaccaccgcggcagcgctctcctcctcggctccttcatccattaccccggaatcaccttccagccagcgcccgacgcccccgaccgcctccccctcgagcaattccgcctgaagctcgacgaccactacatcgccctcggatgccgccatggcctcgcgctcttcttcctcccgatccggctccaggtgctcgtgtgggaccccctcgccggccacca

SEQ ID NO: 9405 - DNA, 343 bp, Triticum aestivum
  Clone ID: uC-tsrow189068f11b1
cttacgcgtccgctctccctcccgctcccttccggtctcactgacacccgggactgggcagccgacggtttccccgcctcgccggactccggtgccggcaacgacgacgacgcctgctccgtctgcctcgagagaccctgcaacgtcgccgccgaagtgtgcgggcacgagctgtgcctcaagtgcgcgatggacctgtgcacggtgatgaaggcgtacgaggtgccggggctggccggcaccgtgccgtgcccgctctgccggagcggcatcgcctccttcaggaaggccgtcgccgcggccaccgcgtcgcccgaggacgaccagcaaagcatgagcggca

SEQ ID NO: 9406 - DNA, 356 bp, Triticum aestivum
  Clone ID: uC-tsrow189068f12b1
gtttttgctgccacttgtaaaacgactgaggatggttttactccagcgagcacgggacgagaatttcctggtctcaaattgcttgcagtggtggaaagcatcaagaaggagctcccaaccatcacgcgatttctggagcaacggtcacttcccgtcgaggtagccacgtcgtttgctcggatccatgaactactggaggattctaacttgaaggaaggaaatgccgcagtggatgctgggggcgaggggacctctgagttgactgcaccgcaccctcctgccattccaccgcatgggcctgtgcctgatgaagcggtgcagaacggcagcgatcatcctgcgccggaatgctgtga

SEQ ID NO: 9407 - DNA, 404 bp, Triticum aestivum
  Clone ID: uC-tsrow189068g01b1
cttttcgttatacagatcacggccgcggtgaccgggacaggtcaaaatcaaaagcgggcgagccaaaccaacgcaaaccccaaatccccaatccgagctgccctctccccccgagatggcggcggtctggatggcgttggcggtgatgctggtcgctgctgctcaggtggcggtggctgccccggtgatggcgccggccttcctctgggcgcccaagaactacggacttagtcccaatgaggctaaagaagtagtccactatcagacaatctccccaaagagtttagctgattctgttctcgaggaaggtggctggtcaaacttggtgtgttcaaaggatggtcctcaaaagaatgttgatgttgcagttctttttcttggatcaaagctacaatcatcagaca

SEQ ID NO: 9408 - DNA, 478 bp, Triticum aestivum
  unsure (1)..(478): unsure at all n locations
  Clone ID: uC-tsrow189068g02b1
ctttagatttcacgaaggttaatgccgctgaggcatttaggatcgccggcattcagcatggcttcttcgagctgcagccaaaggaaggcctagccatggtgaatggcacggcagtgggctcggggcttgcatccatggtgctttttgaggctaacatccttggcctccttgccgaggtcctgtcagccgtcttttgcgaggtgatgaacggcaagccagagtacaccgaccacttgacccacaaattgaagcaccaccccggacagattgaggctgctgctatcatggagcatatcctggaaggcagctcctacatgatgctcgcgaagaagctcggtgagcttgacccattgatgaagccaaagcaagataggtatgcactccgcacatcgccacagtggcttggcccttagattgaggttatccgtgctgccaccaagtcgatcgagcgggaaatcaactncgtcaacgacaaccc

SEQ ID NO: 9409 - DNA, 411 bp, Triticum aestivum
  Clone ID: uC-tsrow189068g04b1
gttagcctttgtcaaatcgagctccagctactgagtgagagtgaagtttctagccggaggagagagatagaagtatgggtatggggtggaaagttctgagcgatgtgaagccatacctggcgatggtgctgctgcaggtggggttcgccgggatgtacatcatcgccggggcgtccctcaaggcctggatgagccacttggtcctcgtcgtctaccgtaacctgatcgccaccgccgtcatggcgcccttcgccctctacttcgagaggggacggaggccaaagatgacaaccaccatcttcctcaagatcatggggctcgcaatcctggagcccatgatcgaccagaacctctacttattgggagcgaagctgacctcggcgggattcgcaacggcgctactcaacaccc

SEQ ID NO: 9410 - DNA, 430 bp, Triticum aestivum
  Clone ID: uC-tsrow189068g06b1
ccttggcctacccgcaggccgaagcgcgaggcccaccggagccccggtcggaggccctggtggagcccgtgcgggtcaacggctctgcggcggaggccacgctctccagcgccgagctggcgtggcgccccaccgcggccggccgcgacagcggtggaaggcggaagctggagctggagtccgacgtgctcgggttccaggtggagggcagggctctcaaactcgcgacctttacgaggggggacgtgacgggcgcggggaggccgccgtctccggtgggctgcggcggaggtgcagaggacaggaagagaggggaggtggcggtggagatggagagcgaggaggccgcggagaggtgggggcatgccatcagagatcgcttcgcctcgcttggtcgaccgaagagactgttcttcatagtgaaccctta

SEQ ID NO: 9411 - DNA, 396 bp, Triticum aestivum
  Clone ID: uC-tsrow189068g07b1
gttcccgctgtacgagcggctgctggaggggcaggtcaacttacagcgcggggccgcccccgtcgaccagctgccccgcatcgacgcgcagatcgccgcgcgcgccccgccgcccatgccccccgccgccgcgcccgcgggcggcgaggagctcgacctcttcatgacacactatgtgctgctcctctgttccttcaaggagcagctccagcagcatgtgcgcgtccacgccatggaggcggagatggcctgctgggagctcgagcagactttgcagagtcttacaggggcatctcctggcgaaggcaccggggcgactatgtctgatgatgaagacaacccggtcgacagcgagagcaacatgtttgacggaaacgatgtgtcagatggcatggg

SEQ ID NO: 9412 - DNA, 402 bp, Triticum aestivum
  Clone ID: uC-tsrow189068g08b1
cctacgcgtccgcctgctactgctagtacgttccaggatcaccggagccccgggagaagagcaaagcgtagcggaggagggagagggggagagagatgaggtggacggcgttcgcgtgggagagcgcgtcccgggccttcaacaaccgccccaccttcaccggcctcgtcgtcgtcctcgccgcaagtagtggaggaggcctcgtcgcatatgcggactctcagccggaccagccccaaggatttaaaaagaagaaagtagtggttcttggaactggctgggctggcaccacattcctgaggaatcttgatagcaaactgtacgatgtccaggtcatttcacctcggaactactttgcattcacacccttgctcccaagtgttacctgtggaacagttgaac

SEQ ID NO: 9413 - DNA, 63 bp, Triticum aestivum
  Clone ID: uC-tsrow189068g09b1
tttcgatttaaaaaaaaaaaaaaaaaaaaaaaaggaaaaaataaaaaaaaaaaaagggaaaag

SEQ ID NO: 9414 - DNA, 95 bp, Triticum aestivum
  unsure (1)..(95): unsure at all n locations
  Clone ID: uC-tsrow189068g10b1
cataaggttgagtctgagtttgtaccgggctacatttcagattgcatgggggttactacacngactcccctagcttcaggggttctcactgggaa

SEQ ID NO: 9415 - DNA, 429 bp, Triticum aestivum
  Clone ID: uC-tsrow189068g11b1
tgttcggttctgccagccagcgagcgagcgcaatgcctagcgccgaggcccattcccccgtcgtccttccccgcccattccacgatccctcggccgcggtcgggtcgccatgggaatggggccgctcgagaacgccgccgccgtcgtcgagggcggcgtcgccgccccggtggtgccggtggtgaccgcggcggcggcgggaggggggtcgtacgcgctgctgcagtgcggggaggactcggcgtacgtgcgggacgcgtacgggggctacttcgaggtgttccgcgcgctgctggccgaggacggcgagcgctggcaggtgtaccgcgccggcgccggcgagctgccgtcggaggaggacgcggcggggctcgacgggttcgtcatctccggcagctgcagcgacgcccacggcgacgagccctggat

SEQ ID NO: 9416 - DNA, 391 bp, Triticum aestivum
  Clone ID: uC-tsrow189068g12b1
gttagggtgacgactacggcgccatatccatcagggaagatcccaatggagagcggggacacggacggaagcgccaacgacaacaacagcaagtcctcatcgtgcacagagatcgccttctcaagcaaccatgaagagtcgctgcgcctaggccggcccaggaacatcagctttagcggggagtccccgagtacaaaattacacatctgatccgatatgatcttccggttgtccatagattcaaccacgatggctgatgcaaaaccgcaataagaagattttgcatccaggcaggcaggcaggcaggcaggcaggaggagggaagggatattgggaaaaggcaggcagcatgatatatgttattgatgatgttgttattcttgtttatgat

SEQ ID NO: 9417 - DNA, 318 bp, Triticum aestivum
  Clone ID: uC-tsrow189068h01b1
cttcagtcttttgcaggatatcatgggctgtgggggtatgggcataatctacggcggctacggggatcggtggcgccagatgcgcaagatctgtatcgtggagcttctcagttccaagcaggtgaggcgtatggagggcatcaaggccaacgaggtaggtaacctcctccattccatggccgccgccggtgctaccgtaaatgtgagcgcgaagatggcaacactcagcagcaatgtcgtgacgcgagcagttttcggcggcaagttcacacggcaggatgagtacctccatgagctaagcaaggtgaacgagcttat

SEQ ID NO: 9418 - DNA, 312 bp, Triticum aestivum
  Clone ID: uC-tsrow189068h02b1
cttaactgttccggcagaatagtactgcctttggggactggtcgaagttcaccgaggagtttgtgaccttctacttgcaccttaaacctgcaactatactacgctaatggagaagatgcgggcagcatgggaggcgccgcctacgcaacaactgcctccggggttccggttccaccccaccgacatggagctgctgctgcagtacctccgccgcatggccctggaccgcccgctgcccgccgccgtcatccccgtcgtccacgccgccgacatgcccgacccctgggacctccccggcgcgagcgaggggga

SEQ ID NO: 9419 - DNA, 302 bp, Triticum aestivum
  Clone ID: uC-tsrow189068h04b1
gctctacttacggtaagaaccacaaccaccacaagggagggttcattttaacaagggatgaccaaaacagatggcaatgaggccgcttgtcatcctggccctggccgtggcgctcgccggcgtggcactgggagggggcgcggccgacggggccggccagtgcgggaggtcctcccccgaccggatggccctgcgcatggccccgtgcatctcggcggcggacgagccggactcggcgccgtcgagcagctgctgctcggcggtgcacaccatcggcaagagccccagctgcctgtgcgccg

SEQ ID NO: 9420 - DNA, 246 bp, Triticum aestivum
  unsure (1)..(246): unsure at all n locations
  Clone ID: uC-tsrow189068h05b1
gataaagataacagagagaggggaagagcacacgggcccgggaaatatgaacacgggcgggagaaaacaaaacgcgacnggcgagtttttccggcgccgtgactagtggaggaggcaccccacgggggggaaccagctgcgccacgccactccggggctaggcatcgccatcgtcgcctttggtatctaccttgtccgcgaggcctcctacaaccgcctctaccgccccgccggccacaaccacca

SEQ ID NO: 9421 - DNA, 317 bp, Triticum aestivum
  unsure (1)..(317): unsure at all n locations
  Clone ID: uC-tsrow189068h06b1
atagatcatntgatattgttcaaactccattagggtgtacaaaacgtacgcacgctagaatatatacaaaaactcctgctgcatcatccatcatgacatgcagcatcgcacacaacaaaggataaagctggacaaaaacaggtccaagaggagctgctactgctcttcttctaagattcactcgatctactgccgtagcgcgatacgtactaccgtatgtatctgcgcggccttgtgtacaaaaaccgtattgacagcgtcggccggtgcgtctcgatcgccgactatttctacttctctgcggagccggggtccca

SEQ ID NO: 9422 - DNA, 367 bp, Triticum aestivum
  Clone ID: uC-tsrow189068h07b1
cttacgcgtccgcccacgcgtccgaccggtgaagggatactctagtgtggaagcgcttcggcctcggcatctccacatgccacaagctcgtcctcgaggtctgcggtgccatcaagtccgtcctcatgccgcgtttcctccagtggcccgacgaggccgccgccggcagattcaaggagggcttcgagagatccttcggtgttccgggggtcatcggagccatgtacaccacgcacatccctatcatcgcgcccaagatctccgtcgccgcctacttcaaccgtcggcacacggagcgcaatcagaagacatcctactccatcacgctccagggggtggtcggccctgaccgcgccttcaccgacgt

SEQ ID NO: 9423 - DNA, 437 bp, Triticum aestivum
  unsure (1)..(437): unsure at all n locations
  Clone ID: uC-tsrow189068h08b1
gttgatctgaaagaagttgaggtacgcgcatccagcaaggatgactactgtgaagatccagcacctaatagcaaacagaaccctgctgctgctatcatgccatccaatcctccacaattgattctcccttccaacatggtagaagaagccaaggcatctgggcaatcttctcagactgaagctgacgaggtcaacgataatctctgcgtggagaaagcaaggccagcctaccaaagaaccttatcaggtggcctgcaaagccctagagatgccgtcgtctcccaggatgcaattcttgagagagtgaactccaagaacaagtcaaaatcctatcagctcggcgacaggctgtccctgaaatggagcactggaaatggtccaagaattgngtgtgtgaaggattatccaatagagctcagaatgcaagccctggagat

SEQ ID NO: 9424 - DNA, 465 bp, Triticum aestivum
  Clone ID: uC-tsrow189068h09b1
cttcgcagcacacatccgccgtagccagcgctcggtctagcttgcttggggcgtgggtcgccggcggcagagaaagaaggcagacagaggaggaatataccggtcgagatgtcgaagtacgtggagatgctggacatgggcgtgcgcatcgcggccaggttccactcccactgcccgcagacggcgcgcatgtactacaagccgccgcagtccacctccacgtcgtcgtcgggcgccgccgaggccgcgtcgacggatcggagggccgccggctttgacggcgaagacgtggctgctggcttccggcccttcgccgcatcgggagggttcggcgacggcgtccagccgcggttcggcttcgacaccgcgcaggtcgtcatctacgaggtcgtatgagtcgagggcttgaacaacggcgacgaattctaatttctaaaaggagagaggtctctttgatgagatttt

SEQ ID NO: 9425 - DNA, 396 bp, Triticum aestivum
  Clone ID: uC-tsrow189068h11b1
cctacgcgtccggccgggagagaagatggggcaggggacactggaagtgctgctggtgagaaccaaggccctcgagaacaccgactacctctgcaacatggacccgtacgcggttctaaaatgcacctcgcaggagcagaagagcaccgtcgcctcaggaaagggaagtgatcctgagtggaacgaaacctttgtgttcaccgtctctgagaatgcaaccgagctcgtcatcaagcttctggacagtgatggtggcacggacgacgacagcgttggtgaagcaacgatcccattggatggagtgtacactgaaggaagcatcccaccaactgtttacaatgttgtcaaagacgaagagtaccgtggagaaatcaaaatcggtctgacgttcactcc

SEQ ID NO: 9426 - DNA, 83 bp, Triticum aestivum
  Clone ID: uC-tsrow189071c02b1
ggctccagcgcgctcgttcaagtccccggcgccgtcctccatgctggcggactgggggtcgccggacgggaagctggactggg

SEQ ID NO: 9427 - DNA, 178 bp, Triticum aestivum
  Clone ID: uC-tsrow189071c07b1
cactgtttttcggagaacaatctcgggagtcgcataatcactacaacatgaatcgaggctgttgcaaaagcaggtgcaggtgcccatgtttacaagacttgtcttcttgacgaagccgatgcttaaaccttgtttacccaaagaacttttgggagtgtgggtgcctgccctgcccatt

SEQ ID NO: 9428 - DNA, 174 bp, Triticum aestivum
  Clone ID: uC-tsrow189071c09b1
ggtaaccccggcagatagcgcgatcacgcgcatcccccgaaagggaatcgggttaagatttcccgagccgggatgtggcggttgacggcgacgttaggaagtccggagacgccggcgggggcctcgggaagagttatcttttctgcttaacggcctgccaaccctggaaacggt

SEQ ID NO: 9429 - DNA, 170 bp, Triticum aestivum
  Clone ID: uC-tsrow189071d01b1
gctccagcgcgctcgttcaagtccccggcgccgtcctccatgctggcggactgggggtcgccggacgggaagctggactggggcgtgcagggcgcggagctgcgcaagtccacgtctttcggggtcagaagcagcagcagggcgcatgatgcgactaggcaggaggacat

SEQ ID NO: 9430 - DNA, 68 bp, Triticum aestivum
  Clone ID: uC-tsrow189071d04b1
caagatgctggacaagctgtgggacgacgtggtggccgggcctcgcccggagacgggcctcgacaagc

SEQ ID NO: 9431 - DNA, 272 bp, Triticum aestivum
  Clone ID: uC-tsrow189071d06b1
cccgaccatcacgttgttgcacgcagaaggtggagctggccaaagacgacgtctacggcatccagagcctctacggcggcaaccccaacttcaagggcgtcacgccgtcggccaccagcagcgaggagacccacagcgccgccccgcgcgcgctctccggcccgtggagcggcctggccggggcggctgcgctcgcactagccttgtcgtgctagttcttctttgcgtcgatcgattcacgaccattatttttaacgggcatctatttcact

SEQ ID NO: 9432 - DNA, 264 bp, Triticum aestivum
  Clone ID: uC-tsrow189071e09b1
ttttgcatgccaatgttgtgggacaaagcggtaacacagtccaggtgaattccttttctgctgcacgtgcttatgtcccactacccaatctttcgggaaactccaatacgatttccacttcggtttctgtcactgctggtctcattaatgacatcagtcgggacgcattatcgaatgcaccatctaccggaagtgggctcagtctcactaactgtgcaacacagtcagctctgtctgtgaatgttcctcagtttttaccacacc

SEQ ID NO: 9433 - DNA, 282 bp, Triticum aestivum
  Clone ID: uC-tsrow189071e10b1
cgatgcaaagcaaagtaatggtcaaatccatggaaagagtgtaatgcatacagttagaggtggtgtgttcctctttggtcaagcgatatcttgcttggtaaatactccaaaacatagaattagctccactgcggcaattaactatgagttgggacgatctagaacaacattaacctataatggtgaaaaattgactgttgcttcccgtggtgttctggatggtgcaccttctggagaacctagtgatgcatacagagatgacaagtttccagatgctggctt

SEQ ID NO: 9434 - DNA, 255 bp, Triticum aestivum
  Clone ID: uC-tsrow189071f04b1
gccaggcccaatcgccaaaaaccctagcgccgatccgatccgatcgagctctgcctcccctcccatggcggcccccccgagccaggcgagcctcctgctccagaagcagctccgagatctagcgaagaaccccgtggacgggttctcggcggggctggtggacgacggcaacgtgtttgagtggcaggtcaccatcatcggcccgcccgaaacattatatgatggaggctacttcaatgcagtaatgaccttttc

SEQ ID NO: 9435 - DNA, 238 bp, Triticum aestivum
  Clone ID: uC-tsrow189071f05b1
catatttgaggtgccaccatgttcaacaggttatttgggaagcccaaggagcaggccaacgccggcgcgttggccactttggataagttaaacgagactcttgatatgctggagaagaaagagaaagcgctagagaaaaaagcaggcgctgagcttgagagggccaatgaattctcaaaagcaaagaatataagagcggctatccaatcattgaagaggaaaaaactctatgagcagc

SEQ ID NO: 9436 - DNA, 177 bp, Triticum aestivum
  Clone ID: uC-tsrow189071f07b1
cggcggcgaggactggctcgcccagctcctgcccgaggcgcgcagtatggacgtcaacaagataatggaatgtctgaagaagcatctgccggtatctgtgccagagggactgaacgaacttcaaatcatcgttgtgcggttcgaagacaagatttatactgcagcgaccagccagtc

SEQ ID NO: 9437 - DNA, 229 bp, Triticum aestivum
  Clone ID: uC-tsrow189071f10b1
cccgacgctgagttcccgtcggctcgtccgggaagagcagttcgccgccgttgaagcgccctccccggtcgctcgccgccatgaagaaggttgtgctcaagctggatgtgcacgacgacaggcacaaggccaaggcgctaaaggccgtctccggcctccacggcatcgaccagctgggcgtggacatcaaggaccagaagatgaccatcgtgggcaccgtcgaccccgt

SEQ ID NO: 9438 - DNA, 205 bp, Triticum aestivum
  Clone ID: uC-tsrow189071f11b1
gttttaatcgtatgctttttactcatgacactggagcccccactgcacacaagtcgtggtggaagtttgtccagttcggagaaaaaagaaacaaagttcaaaaagaaaaatcatgagttcaccttccataaagtttgaattacagagatatcaccttgatgagtatgtaatatgattgcaaatttgcaattaggaatgggtgtgt

SEQ ID NO: 9439 - DNA, 246 bp, Triticum aestivum
  Clone ID: uC-tsrow189071g01b1
ttgaatcaaaaatttatgcagcatctggagaccaatccggatcatgagtgtctcaagggcctgtttgattggatgcactcgtacttccgtacttgcccagattccctcaagccatgtatcttctacctgtcaattttcccttgacaccacggcatttcggcaaaggcgactagtaaggaggtggattgcagaaggttacttttgagacagtgatgaagaatctgccgttgacaaaggggagaactt

SEQ ID NO: 9440 - DNA, 273 bp, Triticum aestivum
  Clone ID: uC-tsrow189071g09b1
aacactcattttggcattgaacaaagtcgaagagatgacttggaatctcttggatatgtacttatgtacttcctacggggaagccttccttggcaaggtctgaaagcaggaacaaagaagcaaaagtatgagaagatcagtgagaaaaaagttgcaacatcaattgaggctctgtgtcgtgggtattctactgagttcacatcatatttccattattgccgctcgcttcggtttgatgacaagcctgattattcctaccttaagcgactgttc

SEQ ID NO: 9441 - DNA, 136 bp, Triticum aestivum
  Clone ID: uC-tsrow189071h04b1
tgagatggtccccgtcgttgagcgcctcaagaccggcttctagaagttcaagaccgaggtctacgaccagaagccggatctgttcgagcccctcaaggcccaccagtcacccaagtacatggtgttcgcgtgcgct

SEQ ID NO: 9442 - DNA, 192 bp, Triticum aestivum
  Clone ID: uC-tsrow189071h10b1
gggtgataacagggatggctaccggtagtgatgctggaaagtccgctgaggcagtgttggagtggcctaagcaggacaaaaagaggatgctgcatgctgtttaccgtgtgggagatctcgaccgcacaattaagtgtttcacagaatgctttgggatgaagctgctgaggaaaagagatgtcccctaagaga

SEQ ID NO: 9443 - DNA, 321 bp, Triticum aestivum
  Clone ID: uC-tsrow189072a01b1
ctctctcgaccggcgccgttttctcaacccacatggctctcgaagcgcgcctacgcctgccgttcgcggagccaactccggacaccgttttgctgtgaggatccaaccacaaacccaggcacatatgcttgtccctcaaacccgcctgcacttctatcttcgccgacaatgcgccgccgcccatcgtggaggtgggctccgccaacgcggacatctacgtcgaggtcgaccgtctccctcttgtcggcgagacggttgccccgagtgccggtcacagccttgacggcgggaagggcgccaatcaagctgactgcggggggc

SEQ ID NO: 9444 - DNA, 449 bp, Triticum aestivum
  Clone ID: uC-tsrow189072a02b1
cattttcgccccttcctccctccctcctcctcctcgcgcgtcctgatccatcatccagcccaggtgattaaggtcgccatgtcggactccgaggaccaccacttcgagtccaaggccgatgccggggcgtccaagacctaccctatgcaggccggcgccatccggaagggcggcttcctcgtcatcaagaaccgcccctgcaaggtggtggaggtttctacctcgaagacaggaaagcacggtcatgctaaatgccactttgttgccttagatatattcaatggtaaaaagcttgaggacattgttccttcatcccacaactgtgatgtgccacatgtggaccgtactgagtatcagctgattgacatatcagaggatggatttgtgagccttcttactgataatggtagcactaaggatgatcttaaactcccaactgatgatgctat

SEQ ID NO: 9445 - DNA, 413 bp, Triticum aestivum
  Clone ID: uC-tsrow189072a05b1
gtgttcgcatcgcaccgcacaccaaccaaacactcgcctgccttccttccttccttgttcgttcctcgacgcacgcacgcagatctcatccatccaagccaaggcaggtcaggtcaggtacgagatggctctcaccagaattggtctcgctggcctcgcggtcatgggccagaaccttgccctcaacattgccgagaaaggcttccccatctctgtctacaacaggacaacgtccaaggtcgatgagactgttcagcgtgccaagctagaaggaaaccttcctctctatggtttccatgaccctgcatcctttgtcaactccattcagaagccacgtgtcgtcatcatgcttgtcaaggctggtgctccggtcgaccagaccatcgcaacgctcgcagcacacctggagcaag

SEQ ID NO: 9446 - DNA, 210 bp, Triticum aestivum
  Clone ID: uC-tsrow189072a06b1
tcgtacttctgtctgcctcgtactccttaattaccatggcctgcaccaagcattgcgtgatctccgccgcgcctctctgagcacgctcggtcagcttcagatacctgcgcgcgcggatcatgggagcggctagatcctgcgtgtccgtcaagccggccgctggccctggcaggtacagatccgccagggtcggggcggccagcttggagc

SEQ ID NO: 9447 - DNA, 436 bp, Triticum aestivum
  Clone ID: uC-tsrow189072a07b1
tatatcctcccggcctgcacacgcacaagcagcgagccttcctcctccagtcctcatctttctgccatgaagccccctcacttcaccggggaggccgccgccggcgcctcctgggctcacgaggtcaagcaggcccttcgtgacaagctccggtggacacccgccgcgggcaccacgggcaccggcggccacggcgccgcgaggccgccggcggcctcctcggctgtgaccgccgagccggtggcgcagccggcccacggcgccgactgccggggcttggccgccgccgaggaccccatcaggagggtcatgttcttggccccctggggccacacataaacggaaaaagcaagtgcacgcgcgcacggccatgccttggccggatctgcaactgcacctcaacaaaaatatggactactacgtacatatatatatg

SEQ ID NO: 9448 - DNA, 333 bp, Triticum aestivum
  Clone ID: uC-tsrow189072a09b1
tctaggagaaagagagtttgttagggacaatggatcccttggtagcttcaggcttgatggaattcctcctgctccgcgtggtgttccccaaattgaagtcaagtttgatattgatgccaatggcattctgtctgttgctgcggtggataagggcactgggaagaagcaggacattacgatcactggagccagcacactgccaaaggatgaggtagagaagatggtggaagaagctgaaaaattcgcggcggaggacaaggagaagagggacgcaattgacaccaagaaccaggcagagtctgtgatctaccagactgagaaacaactgaagga

SEQ ID NO: 9449 - DNA, 283 bp, Triticum aestivum
  Clone ID: uC-tsrow189072a11b1
tttcacgcgtccgcggacgcgtggcggacgcgtgggcaagaatgtagccgtggaagttgccgacaagctctgtgaatcaggcgcagccagcctcctaggcaagaagcttggatcgttcacacggatatcctgttctgttcaggcagctatggaagaggctttggttcgcattttgaccccaaggcgagctattgacgtactgacagatgctcatgctgccaacgaccgtggtacgccgtatgtcataccctttgttggggttaatggggtaggcaaatccact

SEQ ID NO: 9450 - DNA, 293 bp, Triticum aestivum
  Clone ID: uC-tsrow189072a12b1
tttacgcgtccggaccctcgagaggcggccgaaccgagcagacgccatggaccgcgagtggggctccaagcccggcagcggcggcgccgccaccgaccagaatgaggccattgaccggcgggagcgcctgcgccggctcgcgctcgagaccatcgacctcgccaaggacccgtacttcatgcgaaaccatttgggcagctatgagtgcaagctctgcctgacgctccacaacaacgaggggaactaccttgcgcacacgcaggggaagcggcaccagaccaacctcgccaagc

SEQ ID NO: 9451 - DNA, 345 bp, Triticum aestivum
  Clone ID: uC-tsrow189072b01b1
attttgggatggagcctatgaaggtgtacggctgggcggtgtcgccatggatggcgcgggtcctcgtctccctggaggaggccggcgccgagtacgagctcgtgcccatgagccgcaacggcggcgaccaccggcggccggagcacctcgccagaaaccccttcggtgagatcccggtgctcgaagacggcggtctgacgctttaccaatcccgcgccattgcaaggcatattctccgcaaacacaagcccgggcttctaggagcaggcagcctctaggagtcggcgatggtggatgtatgggtcgacgtggatgcccaccagctggagcccgtactcaagccca

SEQ ID NO: 9452 - DNA, 441 bp, Triticum aestivum
  Clone ID: uC-tsrow189072b02b1
cctactcgtccgtccttagctcgagcccagaccggagccctgttccgccgtggatcgctggaggagagggccaccggccggatcccgacgggccagatggtgggcgacccccgcggcgggggcgagtagcacggctgcgatcggcggcggacggatcggcggcgccgcaaggcggcgggggccaccatgtctgccgtagtgtgcggcaagaggtcctccatcttcgccgacgagctcatcccctcctctccgccttcccctccccaccaccacccttccaagcggtcccgctgctccccgacccgcgccttcgacgacgccgccgcggcccaccggcgggaggcgctgctccaccaccttcgctccctcttccctcacatggatccccagttgcttgaaagagctcttgaagcatctggagatgatttggattttgcaata

SEQ ID NO: 9453 - DNA, 392 bp, Triticum aestivum
  Clone ID: uC-tsrow189072b03b1
ggttttcttgttggcgctatgctcccgtactggttctctgcgatgaccatgaagagtgttggaagtgcggttctcaagatggtggaggaagtgcggaggcagttcaacaccatccctgggctcatggagggcaccgccaagcccgactatgcgacatgtgtgaagatctccactgatgcgtccatcaaggagatgatccccccgggtgctcttgttatgctgacacctcttattgtcgggaccttcttcggtgttgagaccctctctggtgtccttgccggtgctctggtttctggtgttcagattgccatttcagcatcgaacaccggtggtgcctgggacaacgcaaagaagtacattgaggccggcgcgtctgagcatgcaaagagcct

SEQ ID NO: 9454 - DNA, 413 bp, Triticum aestivum
  Clone ID: uC-tsrow189072b04b1
ctttttccttaagcgcatggttgaattccatgcggactcggagacaacagacatctatgtcattaagaaggttgacaacagggtaaagagctctgtagcagattccagcactcctgcagattctgctataatagggactactccagatggatctaagcggcaaaagatatgtgcaagttgggagaacacaatcactggagttggccaagtatttgagggtccaaaggaatttcgtgatgcattgcacaagtatgccattgcacataggtttcattacagatttgtcaagaatgactcttctcgtgtcactgtggaatgtactgatgaaggatgtccctggcgcatacatgcttccaaatcttctgcaaatcaggagttcatgatcaagaaagtggttgggagccatacatgtg

SEQ ID NO: 9455 - DNA, 349 bp, Triticum aestivum
  Clone ID: uC-tsrow189072b05b1
cttgttttctgtctgcctcgtactccttaattaccatggcctgcaccaagcattgcttgatctccgccgcgcctctctgagcacgctcggtcagcttcagttccctcctggcgcggatcatggcgtcggtgagatcctgcgtgtccgtcaagccggccgctggccctgccaggtacagatccgccagggtcggggcggccagcttggagccgacaagcctgcgaatatccgcttattcttcttcttcattgggctcaggcgcagatggctgcggcagaagtgtcggctgcgccgccagtatcagcggcaggggcgttgccgttgctcgtttggttggcgatggctggag

SEQ ID NO: 9456 - DNA, 390 bp, Triticum aestivum
  Clone ID: uC-tsrow189072b06b1
atttttagtactcctggagtcagtgcaatcctttttgatgcgctagcaaaggcaaacattaatgtacgagcaatagctcaaggctgcagggagtacaacactactgttgtattgaaacatgaagattgtgttagggctctaagagctgctcactcaaggttcttcctctcaaaaaccacacttgctattggggtcataggacctggtttgattggggcaacactgctcaaccagctcagggaccaggtagcaatcctgaaggaaaatatgaatattgatgtgcgtgtcatcggaataactggcgcaagcacgatgcttttgagtgaaacgggagtagacctaaccaggtggaaagaagaaatgcaaaaggaagcaaaaccagctgatctt

SEQ ID NO: 9457 - DNA, 412 bp, Triticum aestivum
  Clone ID: uC-tsrow189072b08b1
cttacgcgtccgcccacgcgtccgcaagaagcagcagccatggcgacgcaggccgccttcgcagtgaggttcccgcagctggcgcggccgggcaggggccatggccagggacagccggcgacgcgggtcgcggtaaggggcggcagggccgcggcggcggcggcgcgcggggtgcggtgccgggccggcggcctgatcgagccggacgggggcaggctggtggagctggtggcgcccgaggagggcggccggcgggcggcgctgcgccgggaggcggcggcgctgccgcaccgctgcgcctgggccgcgtggacaccgagtggctgcacgtgctcagcgagggctgggccagcccgctgcgcggcttcatgcgcgagaccgagttcctccaagcacttcatttcaacgccgt

SEQ ID NO: 9458 - DNA, 304 bp, Triticum aestivum
  Clone ID: uC-tsrow189072b09b1
ttttcgcgtgggtccctctgccatcccctctctccccaccactcgtcgccgccggcggcgacgttcaatcttcggcgagatcccctcccccgccggcaggcatggcctccaccttcagcggcgacgagaccgaccccttcttcggcttacttggcgccgccgccgccctggtcttctgctgcatgggggcggcgtacgggacgggcaagagcggggtgggggtggcgtagatgggggtgatgcggccggagctggtgatgaagtccatcgtgcccgtcgtcatggccggggtgcttgggatcta

SEQ ID NO: 9459 - DNA, 379 bp, Triticum aestivum
  Clone ID: uC-tsrow189072b10b1
ggggcaaggacggcatcctggcgacgacgggggccaagaacagcatccgggcgatacggtacaagatcagcgcgagcgtggaggagagcgggccgcggcccgtgctgccgctggcccacggggacccgtccgtgttcccggccttccgcacggtcgttgaggccgaggacgccgtcgctgccgcgctgcgcaccgggcagttcagctgctacgccgccggcgtcggcctgcccgccgcacgaagcgctgtagcagagcacttgtcacagggcgtgccctacaagctatcggccgacgacatcttcctcaccgccggtggaacccaagcaatcgaagtcataatcccggtcctggcccaaactgccggcgccaacatact

SEQ ID NO: 9460 - DNA, 334 bp, Triticum aestivum
  Clone ID: uC-tsrow189072b11b1
ttttacgcgtccgcgcgcgaggcagcggcagcagcagcagcttcccccccaaagccagccagccaaattcccctacccacacaactccactccccaggttagggttttgggatgtcggatcggcagccgtcggaggagccggaggagcaggtggacctggagggagacgacgacgtcatggacgacgaggaagggtaccgtcgtcgtcgccacggtggcgaggactctgatgaaccggaggaggagcccgaggagcctcaaatcgaggttgagggcgatggcgatggagatggccgggaggaggacgccggtatggccgttgcgagtgatgaac

SEQ ID NO: 9461 - DNA, 381 bp, Triticum aestivum
  Clone ID: uC-tsrow189072b12b1
tgtggggcaacgccctctaccccgtcgtcccggggcatgagattgttggcgtcgtcaccgacgttggccccggcgtcaagaacttcaaggccggggacacggtgggcgtgggctacttcatcgactcatgccgatcctgcgtgagctgcggcagcgggcacgagaaccactgccccacgctcgtgctcacctccaacgccgtggactacgacggcgccaccacccagggcggcttctccgacgtcctcgtcgtcgaccagggctacgtcgtccgcgtcccggagggcctgcccctggacggggcggcgccgctgctctgcgccggcgtcacggtgtacagccccatgatggagttcggcctcaacgcgccggggaagcacc

SEQ ID NO: 9462 - DNA, 390 bp, Triticum aestivum
  Clone ID: uC-tsrow189072c01b1
ctttcgcgtccgatccagctctgctcagctctgcctctgccgctgcctctgccgcctctcctccacccaccgagtgaaagagctctccatccgacgaaagatcgaccatggcgggcacggccaactgcatcgacatcatcctcgccatcatcctcccgcccctcggcgtcttcctcaagttcggctgcgggcatgagttctggatctgcctcctgctcaccttcctcgggtacatccctggtatcatctacgccatctacgccatcaccaagtaaaatcgggccgtcccaaagcgttccgcgatgtaatattttcaggatgatgatctcgtctgtctagcccctccatgccttcgtgggttcttttgattcttttccgtgtgcgttgatg

SEQ ID NO: 9463 - DNA, 433 bp, Triticum aestivum
  Clone ID: uC-tsrow189072c02b1
cctttccccaatctcccgtcgcagccctcgaatctccccccgagcatcgaccatgtcggcctactgcggcaagtacaaggatgagctcatcaagaacgctgcctacattggcacccctggcaagggtatccttgctgctgatgagtccaccggcaccatcggcaagcgcttcgccagcatcaatgttgagaacgttgaggacaaccgtcgtgccctccgtgagctcctcttctgcacccctggtgccctccagtacctcagcggtgtgatcctgtttgaggagaccctgtaccagagcaccaagggtggcaagcccttcgtcgacatcctcaaggcgggcaatgtcctccccggcatcaaggtggacaagggcaccatcgagcttgctggaaccaacggtgagaccaccacccagggctttgatgaccttggc

SEQ ID NO: 9464 - DNA, 397 bp, Triticum aestivum
  Clone ID: uC-tsrow189072c03b1
cttattaagcgcattctcgatcccaatcctcacactaggataacaatcgcccaaattttggagatgaatggttcaaaaaggactataaaccaccacattctgagcacaatgaagatgtgagccttgaagatgtcgatgctgcattcgatagttcagaggaacaccttgtggcggagaggagagagaaaccagaatccatgaatgcatttgctcttatttcaaggtctgagggattcaacctcggaaatttgtttgagaaagagatgatggggatggtaaagcggtaaacattctttgcgtcgcaacgtacaccacaagagatcatgtctaaaatagaggaagcctgtggccctcttggttcaatgtgcggaaacaaaattataagatgaaactgaaa

SEQ ID NO: 9465 - DNA, 393 bp, Triticum aestivum
  Clone ID: uC-tsrow189072c05b1
tgttttcctgtggccttcctcccccgccgagccctccaaaccctaggcgccgccgggcaggaagcccatttaccagccatgtttggacgcatgccaaggaagaccagcaacaacaccaagtactacgaggtgcttggtgtatccaagacagcaaccccggatgagttgaagaaagcttaccggaaagctgctataaaaaaccatcctgacaagggcggagaccctgagaagtttaaagaattggcacaagcttatgatgttctcaatgaccctgaaaagagggagatttatgaccaatatggagaagatgcaatcaaagaagggatgggaggcaccggcggcgctgatatgcatagcccctttgacataattcaacaggtatatgggggtggc

SEQ ID NO: 9466 - DNA, 51 bp, Triticum aestivum
  Clone ID: uC-tsrow189072c06b1
gaagactgcaattgaaaaggctggatacaccggacaggatgttattggaat

SEQ ID NO: 9467 - DNA, 422 bp, Triticum aestivum
  Clone ID: uC-tsrow189072c07b1
ttttacgcgtccggagattccatcaaccggatctcttgttgaaattttcaacaaggctattcttgaacgctgtctgaaggtatataaggaaaaactggagggcttacgtctacctgtaccagtagagaaactgcagcaaattcatgaggtggcgaatggcgaagccaaattgctgtttgataaacagcactttggtaagcatcatgctgtacagtcaatcctcaagcttgaagatgagattacaaaggtgtacaaaaacttccttctagctaatgagtatcaatcgtccaagctttgcgaagcacgttttttggaatgtgaagatcaaatggatcaccttcaagtcttgaaacttccttccatggcaaagttcaatgcaggctttttttactgcaatcggacttttgtaatggaatgtgtgg

SEQ ID NO: 9468 - DNA, 152 bp, Triticum aestivum
  Clone ID: uC-tsrow189072c08b1
ttgtcgcctcctgtgcgccccaaaccctagcttgtccgcagcgccgtggactcggctctcccatcctgcaccgggaggcatggtgacggagctgggctacgcgccggccatgaagtccggcaagctcgggtgcgagggaacccaggaggggc

SEQ ID NO: 9469 - DNA, 419 bp, Triticum aestivum
  Clone ID: uC-tsrow189072c09b1
cgcgtgggctcgccggcatgcaagccagcagcaactctcctgtgccggctgggccacgagcttcgccgtgccccactccgagcagcacacctggagcatggccgccggcgccgctgctcgcgccaacgcgcggctggcgcgactactgctgcttgcgcccacgcgctgcctgtgtggctgctgctactctcgcagcggctgatgctgctcgcggccggcgccactgctcgcgcccacgcgctgcctgcgcggctgctgctgctcgcgtccggcgtcgctgctgcttgcggccgacgccggtgctgcataatggcgggtggacagggaggcgcacgacagagcttcgtcgccgcccgatgccatgccccgcatcgggctccgcccgcccggcccggcgctggcgccggtgaaaggttcac

SEQ ID NO: 9470 - DNA, 415 bp, Triticum aestivum
  Clone ID: uC-tsrow189072c11b1
ttatttgtctgtgctacctaatatgaaacacaatatcgtacacaatgtatgaaaggcaaaaagaaaattcactatacaccagtatatcagccacactacatgcgcagtcgcacacaaaacttgtctgtctgtcttcaaggggcagccagctccaggtctccggtttcgctccccacctgctgctgctgctgctgctgcagctcgctcttctgcgcctccagcttcttctgctggaccttctcgccgtacatgtaggaggcgaagccccagagggagagcaccagcgcgatgccctttggcccgtcgaacttctcgtggaggaacatgacggcgaggatctgggaaagcggcaggaggaccgcgatcatgatgccggcgaggagcgaggaggcgcaagtgatgagccccatgatgc

SEQ ID NO: 9471 - DNA, 393 bp, Triticum aestivum
  Clone ID: uC-tsrow189072d02b1
ccttttcgtccgcggacgcgtgggcgacatcaggtcttgatgcaagagcagcagcaattgtcatgagaacagtgaggaacactgttgacactggacggacagtggtttgcacaatccaccagccaagcattgacatctttgaagcttttgatgagttactattactgaaaagaggaggccaggtaatatactctgggaaactgggtcgcaactcacagaaaatgactgaatacttcgaggcgattcctggagtgcctaaaatcaaagataagtacaaccctgcaacgtggatgcttgaggtcagttcagttgctgcagaagtacgcctgagtatggattttgctgactactacaggacttcagatctgtacaagcaaaacaaggtattggtga

SEQ ID NO: 9472 - DNA, 205 bp, Triticum aestivum
  Clone ID: uC-tsrow189072d04b1
cttattaagcgcattctcgatcccaatcctaacactcggatgacaatcgcccaacttttggcaatgaatggttcaaaaaggactatcaaccaccacattctgagcacaatgaatatgtgagccttgaacacgtggatactgcattcgatcgttcagaagaacaccttgtgtcgatgaggtgagtgaaaccagaatccatgaatgc

SEQ ID NO: 9473 - DNA, 466 bp, Triticum aestivum
  Clone ID: uC-tsrow189072d05b1
gttttcgccaacctcctccccctccggccccctcgcgccccagccgccgccgccgtcgccgccgccgactgcagccatgtcgctgatcgcgggtgaggagttccagcacatcctgcgtgtgctcaacaccaacgtcgacggtaagcagaagatcatgttcgcgctcacctccatcaagggtgtgggccgccgcttctccaacaccgtctgcaagaaggccgacgtcgacatgaacaagagggccggagagctttccgcggaggagatggaccgtctgatggcggtggtgcacaacccgcgccagttcaaggtgcccgactggttcctcaacaggaagaaggactacatggacggtaggttctcccaggtcgtttccaacgccgttgacatgaagctcagggatgaccttgagaggctcaagaagatcaggaaccatcgtggtctgcgtcactactggggcgtgcgt

SEQ ID NO: 9474 - DNA, 381 bp, Triticum aestivum
  Clone ID: uC-tsrow189072d08b1
ttttatcgcgtccgcccacgcgtccgctcccaactgggaagacattttgtccttgggagaacagcagaggctaggcatggcccgtctgttctttcactctcctaagtttggtatcctcgacgagtgcaccaatgccacaagtgtcgacgtcgaggagcatttgtacaggctagcaactgacatgggtataactgtggtcacttcctcccaaaggccagctctgatacccttccattcgttggaactgaagctcatcgacggcgaagggaagtgggagctgtgcgcaatcaaccactagccgttgccgtcgccttaatttttgatgggctttagttactctcagctgtatactgacttacatacagtacaaatagtcacctt

SEQ ID NO: 9475 - DNA, 418 bp, Triticum aestivum
  Clone ID: uC-tsrow189072d09b1
tgtctgtgctcatcaccaggaacaccaccatccccaccaagaaggagcaggtcttctccacctactccgacaaccagcctggtgtgctcatccaggtgtttgagggtgagaggacaaggaccagggacaacaacctgctcggcaagtttgagctctctggcatcccgcctgcgcccaggggtgttccccagatcactgtctgcttcgacattgatgccaacggtatcctgaatgtctctgctgaggacaagaccactggccagaagaacaagatcaccatcaccaacgacaagggcaggctgagcaaggacgacattgagaagatggtccaggacgcagagaagtacaagtctgaggacgaggagcacaagaagaaggttgacgccaagaactccctggagaactacgcctacaacat

SEQ ID NO: 9476 - DNA, 367 bp, Triticum aestivum
  Clone ID: uC-tsrow189072d10b1
ttttgcaagggcgaccgtgtccgcttcaagtccgacgcgctcgagttcaacaagatgtcggagctgttcaaccagcggagctcggtggaggggaagatcccgtcggggcagttcaacgcgtgcttcgacctggacagcgggtcgtgggcgcaggacgcgtcctccaccaagtccctcgccatggacggctacttcatctccctcttggacctccgcctcgaccgccgcccgctcgccctcgccgcccacgtcctccgcgacgtccccgccgcctgggaccccgccgccatcgcaagcttcatcgagaagtacgggacccacgtggtggtggggctgagcatgggcgggcaggacgtggtgtgcgtgc

SEQ ID NO: 9477 - DNA, 429 bp, Triticum aestivum
  Clone ID: uC-tsrow189072d11b1
gggttcgtggcgttctcggcgccactggtgctcggcggcggggtggtggcgtcggagcccaggaaggaggtgaacctgtggcggcgccgccccatgtcccctcccactccgctggagctcccctgagagcggtcgccgcagcagctagcagcagctagcaggcctgcatgcgcgcatgcaggccatgccaaacgtgtcgatcgtctgttctttcatccctagagtttgtacagtagtggtatacttctacgtgatgctcatacaaagtaggtagtatcgatttgattttgtaaacgcgtgatgatccctattctggaaggaattgaagaagttttttttaaaaaaaatcagcaggagtgaaagcataattttgcaaagtcgacgaacgagcataatttcgcacacacgcatccttgcttgctttggttg

SEQ ID NO: 9478 - DNA, 443 bp, Triticum aestivum
  Clone ID: uC-tsrow189072d12b1
ttttctcacacctgttttctgcacggtgctctctatgttcacatgaggagaggagaaggacaatcccttctccggctctccataccaataaatatagtcagatactgctgcatcgtctccatctagtagtggaggaagaggagaaaggggtagcagtcagccatggcgacggccaagcccatcctgtacggcgcctggatcagctcttgctctcaccgtgtccggatcgctctcaatctcaaaggtgtggactacgagtataaggcagtcaatcctcggacagatccagactatgaaaaaataaacccgatcaaatacataccagcattggtagatggggactttggtctatctgattctctcgctatcatgttgtatctggaagataagtatcctcagcatcctctagtacctaaagatatcaaaacgaaaggtctcgatct

SEQ ID NO: 9479 - DNA, 307 bp, Triticum aestivum
  Clone ID: uC-tsrow189072e01b1
gatatattggcttctggatgagggtgagaagtggttaaaacctgagtacagatcttgcgggagatcaatgctgcacaaaagtgcaaaagttgaattccaccctcttggggttattggtgcaattgtatcatggaactatcctttccataatgtcttcaatccgatgttggctgcagtattctctggtaatgcagcagttataaaggtttcagagcatgcgagttggtctggctgtttttattctcgtatcatacaagcagctctgttagctgttggtgccccagataatctggttcacatagtaact

SEQ ID NO: 9480 - DNA, 250 bp, Triticum aestivum
  Clone ID: uC-tsrow189072e02b1
tttttgcgggggcaagaatgctgctgggtttccgcgacgcacacaaagctaggaccatggcgccagccggaggacgcactacccatctgctcctgctcgccctcctgctgtccttcgtcctcgcctactccgcggacgggagctacctggagcaccccagcccgggcgccgggggattcttcagtggcataccgtggttccgcggcggacagacgagtggagcccgaggtgccggaggcatgggcgccgg

SEQ ID NO: 9481 - DNA, 411 bp, Triticum aestivum
  Clone ID: uC-tsrow189072e03b1
gttttcgtgctccaagaagagcctcaggtacgccatcacggtggccaccgagacgaccatcgaccgggccacgctgagcaaggtcttcgtgagcgccttcgcgcgctggtcggcggccaccacgctcaacttcacggagacggcgtcggcgtacgacgccgacatcaccatcgggttccactcgggcgaccacggcgacggctaggcgttcgacgggccgctcggcacgctggcgcacgccttttcgccgaccgacgggcggttccacctggacgcgtcggaggcgtgggtggccggcggcgacatgtcgcgcgcgtcgctggacgcagccgtcgacctggagtcggtggcggtgcacgagatcggacacctgctggggcttggccactcgtcggtggagggcgccatgat

SEQ ID NO: 9482 - DNA, 323 bp, Triticum aestivum
  Clone ID: uC-tsrow189072e04b1
gtttgctagctcaagaagaaagaaagaatctgatacattaagctaggcagcatgtacatgatctccagcatgctgggccggaggcagccgccggcgcatccgcagccgcagtagcacgcggagggtcacaaggacaacggccacggccacggcggacgccgggactaggatgtggagccagtgagcatagacatgctggagccggtcatggaggccatctcgctgactgctttcggacgtggcggttgccgcccagcgctgggcctgccggtctccacgacaagcatggactggaaggagacacctaccgcgcacgtgtttat

SEQ ID NO: 9483 - DNA, 346 bp, Triticum aestivum
  Clone ID: uC-tsrow189072e05b1
ccatgcgtccggaacctgttaaaacctcttcaagtaatactggcaggcgcagatctggcagcaagataagaaaggatgcggatcatgatagaagctcctcgaagtcaccatctaacacaaaaggcaatgaggatgagtttgatgactttgatcctcgtggatcttcttcaaatggtgcagctaatacaaagactgccgaggtggatcttcttggcccaaacttgatggatgatttccttgacgagcctgcagccactccatcagcaaaaagtgctgtagaacctcaggttgatctgttttgctgatgcatacttccaatcggcaatcccaggtgccgaaacaactg

SEQ ID NO: 9484 - DNA, 386 bp, Triticum aestivum
  Clone ID: uC-tsrow189072e06b1
ttttcgcgtgggcggacgcgtgggcttgggcacaaagatccaggacgatatatatgctctatgtatgcaaatctacctagcgagcttgaaacgaagatttttgagacaaagagagggataaatttaaaccctatatgatcaaggcacaaagatccagaagtagaaatgtgccaaagctggggcgtcccatggtccctagcgagctaggatgcccacgaaatgaatctgagggtgcgaatagctcagctcgggcagataaaatgttgtaatgtccagactagagcagcagcacaagatgaagtgtaattgtaatacggaattacttgtcacaaaaatggatgtatctacaactaaaatacatctagatacattcatttcttgacgag

SEQ ID NO: 9485 - DNA, 374 bp, Triticum aestivum
  Clone ID: uC-tsrow189072e07b1
gtgttcccaacccaaaccctaccccgccgccgccgtcgtcgtcgtagcgcgcggaggcgacctcccaccgccgccaagatgcagatcttcgtgaagaccctgacgggcaagaccatcacgctggaggtggagtccttggacaccatcgacaacgtcaaggccaagatccaggacaaggagggcatcccgtcggaccagcagtgcctcatcttcgccggtaagcagctcgaggatgggcgcacccttgccgactacaacatccagaaggagtccaccctccacctggtgctccgcctccgcggaggtgccaagatgcgcaagaagaagacctacaccaagcccaagaagcataagcacaagcacaagaaggtgaa

SEQ ID NO: 9486 - DNA, 431 bp, Triticum aestivum
  Clone ID: uC-tsrow189072e08b1
tttgtcgcgtggatgacgatgcaggtcctgctgctaagaagcagcgaggaactccaaagggacaacagtcagcagcgaagaaggaagcaagcggatcccagaaaaagaagaaggcgaaggtagacgaggagctctctgatgaatcctatcaggatgacgacatgggcgaggaggatgatgatgacagcgacgacgactgggccgggtaaggggagcgacaaggagtgcccagatctgacatgccgtgaaaagggcggatcggggatgagcgaccctccctccctcactggcgtgcgtagtagagcgagtgtgtgtgctctttttagctgatcaatgtgaaacaatgcttgtttgttgatgtacaagttgttctagagcatctcaagaatccgatcccgacccacgcggtttgtaataggagtagaaattgc

SEQ ID NO: 9487 - DNA, 387 bp, Triticum aestivum
  Clone ID: uC-tsrow189072e12b1
tgctcctacccaacccagtaaactactgccacccatccgtcggcgaaatggcccacgcccgcatcctcctcctggcgctcgccgtcctggccacggccgccgtcgccgtcgcctcctcctccttcgccgactccaacccgatccggcccgtcaccgagcgcgccgcctcgacgctcgagtccaccgtcctcgccgcgctcggccgcacccgccacgccctccgcttcgcgcgcttcgccgtcaggtacggcaagagctactagagcgcggcggaggtgcggaggcggttccggatcttctccgagagcctcgaggaggtgcgctccaccaaccggaagggccttccctaccgccttgggattaaccgcttctcggacatgagctggg

SEQ ID NO: 9488 - DNA, 262 bp, Triticum aestivum
  Clone ID: uC-tsrow189072f01b1
tttcatggcaccgagccgtcttgtcttgtagcatcatcttagcgtgtgtgctgctaatcctcttttcaagcatgggtggaggccacgacatgcacggcagccccaacggcggcgtgaagggcttcgtgtccggcctcgttaacggcggcaaaggccacggctacgggtcatcgtacggccaggggcacggctacggcggcggccatgtacagggctaccagcagggataccacgggcatggacagagctaccagaccgggta

SEQ ID NO: 9489 - DNA, 412 bp, Triticum aestivum
  Clone ID: uC-tsrow189072f02b1
acagcataccttctgagactcgagtcatcatcaacgcatgggctattggcagagaccccgggtactgggacaagccggacgacttcgtgccggagaggttcctcgagggtggcgccgcggcagcggtggacttgacgggcaaggactttcagttcgtgccattcggggctggccggagaatatgccccggtctcaacttcgggctggctactgtcgagatcatgctggcgaacctcgcatactgcttcgactgggagctgccggtcggcatggagagggacgataaaatcgatatgacggaggtgtttggtctgactgtccgtaggaaggagaagctcatgcttgtccccaacacccacgtggttgcttgatcggtacatagtgcgtccatatttgtataccgctgcatgcg

SEQ ID NO: 9490 - DNA, 319 bp, Triticum aestivum
  Clone ID: uC-tsrow189072f03b1
ggagctaggagaaggagttctcgccgcaaagcatcttgcaggctaggaaagaaaggaagaagggaagggcacatgacgtgcgcggtggcaccgggctcgccggtcttctcgccgtcccgcctcggcctgctggagcagctgcagctccaccaccatcacggctgctccagcggcggcgcctccttcctcccctcctcgccgatgcgccccttcgccctccgcgcgcgcatccaccccgagccctccccgtgcgcctgctgcgtgacggcgctgctccgcgagggcggtcggcagctggtggtgtccggcgcgggggact

SEQ ID NO: 9491 - DNA, 427 bp, Triticum aestivum
  Clone ID: uC-tsrow189072f04b1
gttttctggaggggaaggccggttaaccccaagaagcatggaggagtgagagcttccatcttcattcacgctctggtgctgctgagcaacgctgccaacatcgccaacatcatgaacctggtgacctaccttcgcggcaccatgcacatgggggtggcggaggcctcaacgacggccagcaacttcttcgcggcgctgcagatgttctccatcccggcggccttcctcgccgactcttacatcaagcgcttctacaccgtcctcatcttcggcccgatcgagattctgggctacatcctactagcagtgcaagcgcacgtcccgtctctgcacccgccgccctgcagtcccactggcgcgcaaacctgcgagacggtccgtggctccaacctgagcttgctcctcctgggcctctacctgatcccca

SEQ ID NO: 9492 - DNA, 348 bp, Triticum aestivum
  Clone ID: uC-tsrow189072f05b1
tgttgcgtgggcggacgcgtgggcttgggcacaaagatccaggacgatatatatgctctatgcatgcaaatctacctagcgagctagaaacgaagattttggagacaaagagagggataaatttaaaccctatatgatcaaggcacaaagatccagaagtagaaatgtgccaaagttggggcgtcccatggtccctagcgagctaggatgcccacaaaatgaatctgagggtgcgaatagctcagctcgggcagatataatgttgtaatgtccagactagagcaggagcacaagatgatgtgtaattgtaatacggaattacttgtcacaaaaatggatgtatctaca

SEQ ID NO: 9493 - DNA, 98 bp, Triticum aestivum
  Clone ID: uC-tsrow189072f06b1
ttctcgtcccgtcctcagccaacctcccatctccgtctcgtgttgcggcggcagttccactccctcgccatgggcaagattaagatcggaatcaacgg

SEQ ID NO: 9494 - DNA, 389 bp, Triticum aestivum
  Clone ID: uC-tsrow189072f07b1
tcttacgcgtgcgtcactccaatccaatccccacagaaatccccatctcaaaaccctagcccgtccgatcccggcgagatggccaacccgagggtgttcttcgacatgaccgtcggcggcgcgccggccgggcgcatcgtgatggagctgtacaaggacgcggtgccgcggacggtggagaacttccgcgcgctctgcaccggcgagaagggcgtcggcaagagcggcaagccactgcactacaagggcagctcgttccaccgcgtgatccccgacttcatgtgccagggcggcgacttcaccaagggcaacggcaccggcggtgagtccatctacggcgagaagttcgccgacgagaagttcgtccacaagcacaccaagcccgggat

SEQ ID NO: 9495 - DNA, 429 bp, Triticum aestivum
  Clone ID: uC-tsrow189072f08b1
ttttacgcgtccgcccacgcgtccggggacgcgcccacagcaaagtacgtggagagatgcaagtttccccaagacggctcatcaccaaaatccttgagatacattggaagcatggttgccgatgttcatcgtaccctgctctacggaggcatatttctgtaccccgccgacaagaagagccccaacgggaagcttcgtgttctgtacgaggttttccccatgtcgttcctgatggagcaagccggaggccagtctttcaccggcaaacagcgtgcccttgaaatcgttcctgctgagatacaccagaggtctccgatattcctcgggagctacgatgatgtggaggagattaaatcactgtacgctttggagtcgagcaccgcctgatctgagtacccgaagacacatacacatgctctgcatcgtgtt

SEQ ID NO: 9496 - DNA, 369 bp, Triticum aestivum
  Clone ID: uC-tsrow189072f09b1
tttgtaaattgccggaagcaaggatagcgtgggccaatactagtctcacattgctttcaccctccctgatctgtaccgggttgtccatgggattgacgtgtttgatcctaagttcaacatcgtctctcctggagcagacatgactgtctacttcccatacactgagactgacaagaggctcaccgccttccactctgaaattgaggagctcctgtacagcgatgttgagaacgatgaacacaaatttgtgttgaaggacaggaacaagccaatcatcttttcaatggctcgtcttgaccgtgtgaagaacatgactggcttggttgagatgtacggcaagaatgcacatctgaaggatttggcgaacct

SEQ ID NO: 9497 - DNA, 150 bp, Triticum aestivum
  Clone ID: uC-tsrow189072f10b1
ctcacgcgtccgcttgctgcctacatccagttatgtaaactctgcatcatactgcatgcgtccagaactagtcttcctgtaaccttccttgtctcatggattcagaagttaaattcaaataaaacaagttatggaaaaggtattcctctt

SEQ ID NO: 9498 - DNA, 423 bp, Triticum aestivum
  Clone ID: uC-tsrow189072f11b1
ttttacgcgtccgcccacgcgtccgggccgtcgcagcagaggagcagcagacacccgaccgcagccgtacgccgcagatccgccgccgcgctagggtttcgcgccgaggagaggggagatggacgtggtgaaggcggcgcagctgtcggggcggacgctggagaaggtggtggtccacccgctggtgctgctcagcatcgtcgaccactacaaccgcgtcgcccgcgacaccaggaagcgcgtcgtcggcgtgctcctcggcacctcctcccgcggcgtcgtcgacgtcaccaactcctacgccgtgccgtttgaggaggatgacaaggacccgaggatctggttcctcgaccataattaccacgagtctatgttctccatgttcaagaggatcaacgccaaggagcatgtcgttggctggta

SEQ ID NO: 9499 - DNA, 356 bp, Triticum aestivum
  Clone ID: uC-tsrow189072f12b1
gcccgagtcgccgagatggcttgtgagcaaaggaagaatggccgaggccaagcgagtgttgcaaggactgcggggaagggaagatgtctcaggagaaatggcccttcttgttgaaggattgggtgttgggaaagacacacattttgaggaatacataattgggcctgatgatgagcttgctgatgacggtctggctccagatgaagagaagttgaagctgtacggagctgaagaaggggtatcttggatcgcccgtcctgttaggggcggtggccaaagtgcacttggaagcgccttgggtctcatgtcttgtcatgggagtatggttagtcagggtaaatctttcgtggacccac

SEQ ID NO: 9500 - DNA, 75 bp, Triticum aestivum
  Clone ID: uC-tsrow189072g01b1
ttgatgcgtggggtcgggtggggttgggagtggatgggggcatggagctggaggaggtggtggcttgggatatgg

SEQ ID NO: 9501 - DNA, 386 bp, Triticum aestivum
  Clone ID: uC-tsrow189072g02b1
tttttcgtcgcacgctcctcaaggtcattatcctgggcgactgcggggtcgggaagacgtccttgatgaaccaatatgtgaacaagaagttcagtaaccagtacaaggccaccatcggcgcggattttctcacgaaggaggtgcaatacgaggacaggcttttcactctgcagatatgggatactgctggacaggaaaggtttcagagtcttggtgttgcattctaccgtggagcagactgttgcgttctagtttatgatgtcaattcaatgaaatcatttgataatctgaacaactggcgcgaagaatttctgatccaggctagtccgtctgatcctgataacttcccttttgttctgctgggaaacaaagttgatattgatggt

SEQ ID NO: 9502 - DNA, 323 bp, Triticum aestivum
  Clone ID: uC-tsrow189072g05b1
gtttttaggacaagatcaggcccctgtggaggcactacttccagaacacccagggtctcatttttgtcgtggacagcaatgacagagagcgtgttgttgaggcaagagatgagcttcaccggatgctgaatgaggatgagctgcgtgatgctgtgctgctggtgtttgcaaacaagcaagatcttcctaatgccatgaacgctgctgaaatcactgacaagcttggcctgcattctctgcgccagcgacactggtacattcagagcacatgtgctacctttggagaggggttgtacgaggggcttgactggctgtccaacaac

SEQ ID NO: 9503 - DNA, 291 bp, Triticum aestivum
  Clone ID: uC-tsrow189072g07b1
ttttgcgtccgccaccatctcctacggctcttgttccgttctactgctcctcctccgcgcagtgtgccggacaccaccaccacccaccgagaaaatggcaggcaacggagccatcgtcgagaaggacccggtcaactggggcgcggtggcggccgagctcaccggcagccacctcgacgaggtgaagcggatggtggcgcacctccgcgagcccgtggtgaagatcgagggcgccagcctccgcgtcggccaggtggcggtcgtggcccaggccaaggacgcgtcgggcgt

SEQ ID NO: 9504 - DNA, 370 bp, Triticum aestivum
  Clone ID: uC-tsrow189072g08b1
tctcgcgtccgatcaagtctttcatcttcgacggccgagcttacagcatcacgaaggatgtcttgcagctgtggatcaagctgcggctgcggctcaaactgcaactgcggcaagatgtaccctgacttggagaagagcggcgccaccgtgcaggccaccgccgtcgtcctcggcgtcgggcctgcgaaggtgcagttcgaggaggccgccgagtccggtgaggccgcccacggctgtagctgtggcgccagctgcaagtgcgacccttgcaactgctaaggtgcaagcggttgatgcgcttctggtgattgtgccgtgtgtgatcgagtgcgaataatgaaaccgacgccggccgtctggttggtgctgt

SEQ ID NO: 9505 - DNA, 380 bp, Triticum aestivum
  Clone ID: uC-tsrow189072g09b1
tatctcacacgaagctcatagccattcaaagcctatccatctgcgaagctccaacccaacctcgaagatgtcgtgctgcggaggaaactgcggctgcggcaccgcctgcaagtgcggcaacggctgccgcggctgcaacatgtaccccgaggttgaggccgacggcgccaccctcctcgtctacgtcaccgacacccacaaggcgagctccggcgggatggagatggcggccgagaacggcggctgcggctgcacccagtgcaagtgcggcaccagctgcagctgctactgctgcagctgctagatccatcatcgatcatgcatgcaccgtgccgagcgtgcatcatcgatcgtatcgatctactactaccataccatgt

SEQ ID NO: 9506 - DNA, 232 bp, Triticum aestivum
  Clone ID: uC-tsrow189072g10b1
tctctaattcctcgcgattcctctcccctcgcctcctcgttctccccctcctaggggatcgtcggtgaggaatcgcgacgagggcttcctcctatcagttaaatcaaagccatggagcacaaggagaccggctgccagtctcgggagggtcccatcctttgcgtcaataaactgcggattctttggcagcgcggcgaccatgaacatgtgctccaagctgccacaaggagat

SEQ ID NO: 9507 - DNA, 471 bp, Triticum aestivum
  Clone ID: uC-tsrow189072g11b1
ttttaatttcctctgttggtctcatgacgccaccttgcttatcttccctgcacgcactccccacagttcaggtcgttggtgcggccatgggtctggtctaggtaccgtgcgcctcctcgatcccccaggcccgtcaatagtgaggaggcatagcagggcttgaggagcagttgcgtgagggagtagttgatcagttgagctagtcgaactcgatggtggcgttgccgtcagcgtggatcgtctcccctgcggtggctgggaggtaagcgagtgaagcagcatggagtttgaggttcccccgtgcgcgatgttggagctccagcatgcaaggcacttttcagcctatgatgaatgcaggtttgtatccacaccggctagttgcaaggtcgctaaggatgtggataagccaatacagtatagttcaaagtacaaagcaaattaagaacagattttaggtaatgtagtcagcat

SEQ ID NO: 9508 - DNA, 238 bp, Triticum aestivum
  Clone ID: uC-tsrow189072g12b1
ttgttaaaggaggaggccaaggaagagagcgatgatgacatgggcttcagcttgtttgactaagcagttcaattccagctctcctgtggaatctgctatgctaaagattacctatcttatgtgcttttaggttgaattttgcggatttgatatgtaattctgttgagacctaagtatctgtgcaatgagtactgcaaaccaccttgggatggtctttttagaatgaaaatggttctac

SEQ ID NO: 9509 - DNA, 316 bp, Triticum aestivum
  Clone ID: uC-tsrow189072h01b1
ttctatgccgcacgctcctcaaggtcatcatcctcggcgacagcggggtcgggaagacgtccttgatgaaccaatatgtgaacaagaagttcagtaaccagtacaaggccaccatcggcgcggatttcctcacgaaggaggtgcaatacgaggacaggctcttcactctgcagatatgggatactgctggacaggaaaggtttcagagtcttggtgttgcattctaccgtggagcagactgttgcgttctagtttatgatgtcaattcaatgaaatcatttgataatctgaacaactggcgcgaagaatttctgat

SEQ ID NO: 9510 - DNA, 298 bp, Triticum aestivum
  Clone ID: uC-tsrow189072h02b1
ctcttgcgtccgcccacgcgtccgcccacgcgtggggccactcttacgtggccgggcggtctcaccacccccacgcgcacccacatccgcacccacctccgcatcacccgcacccgcaccatcacatgccgccgccgccgcagttcgccaagcactacgcgccggggccgccgcctccccctgccgcggccgggcgacgcacgccgaccccacccgcggccggatccggcgggaacggctgcgaggagaataagacgatctgggtcggcgacctccagtactggatggacgagaacta

SEQ ID NO: 9511 - DNA, 392 bp, Triticum aestivum
  Clone ID: uC-tsrow189072h04b1
ggtttggggaaggggaagcagtgtgtgtcggcgcggcggagcaatggcggacaagccgagccgggcgctggtgctctacgccgccggccacgcggcgctgctcgccgggggcggaggggggaagggccacctcgacgcgttcgcctccatcgcctcctgcggcttcctctccgtccgcacccccgccgtcaacgaggatggaggggacaagaacagcggcacgatccttgagctggggcagctgctcgacgtgtgcgatgccctctatcctgccaaggatggggaagttgcccgggtggatccgcaggagctagtagtccccaagctatccgagaggttcatggggctgagagctgctatggtcaccaattgccccggtgttagctcattcg

SEQ ID NO: 9512 - DNA, 422 bp, Triticum aestivum
  Clone ID: uC-tsrow189072h06b1
ggagttgtccggacaacgccctcggcaagatgcaggtgcggtgctacatgaatgggcactcacgccccggtgagccgcatttccctttcagtgtcgacaggggatttgtccggtcgcaccggatgcagcgcaagcactaccgggggctctccaacccgcagtgcatccatgggatcgaggtggtgagctcgccgaatctcgtgggcatcaccgatgtcgaccggaggaggtgggcggagctcacagggagggagcttaatttctccatcccacaggaggccagtgattttgggacatggaggaccatgccaagctcagagcttgagctggagaggccacacacacacactgccatgaagagcaatactaataatgttcagcagcagccccccaagaagacgcttaatggatctggcttgaat

SEQ ID NO: 9513 - DNA, 347 bp, Triticum aestivum
  Clone ID: uC-tsrow189072h07b1
ttgctacgcgtccgatcaagtctttcatcttcgggggccgttcttacagcatcacgggggatgtcttgcagctgtggatcaagctgcggctgcggcttaaactgcaactgcggcaagatgtaccctgacttggagaagagcggcgccaccgtgcaggccaccgccgtcgtcctcggcgtcgggcctgcgaaggtgcagttcgaggaggccgccgagtccggtgaggccgcccacggctgtagctgtggcgccagctgcaagtgcgacccttgcaactgctaaggtgcaagcggttgatgcgcttctggtgattgtgccgtgtgtgatcgaatgcgaataatgaaacc

SEQ ID NO: 9514 - DNA, 348 bp, Triticum aestivum
  Clone ID: uC-tsrow189072h08b1
ttgtctcgcggatcgtgagtggtggacgattcgcgtttccaaatacacgtctaagcgaagggattttgtggccttttgcttgtgacgtctgaatcggttgatgcctcagatccgtcagtttatgtcatctgcttcatgttagcatgccgctgtggatgtgatgtttatctccggggaacgccactcctgctggttcacaacgggccacggccaacgccaactgatatcttcttcaacgacggtcggtggttaagttaaagaatgctttcttgaggcttcctcgtctctgatcaaatgatgtccgggttgctttttgctcacaagatgatgctggcccgtcttcaaaca

SEQ ID NO: 9515 - DNA, 377 bp, Triticum aestivum
  Clone ID: uC-tsrow189072h09b1
ttgaattcctcgcgattcctctcccctcgcctgcgcgtcctccccctcctaggggatcgccggagaggaatcgcgacgagggcttcctcctatcagttaaatcaaagccatggagcacaaggagaccggctgccagtctcgggagggtcccatcctttgcgtcaataactgcggattctttggcagtgcggcgaccatgaacatgtgctccaagtgccacaaggagatggcgatgaagcaggagcaggccaagctggctgcctcctctttcgacagcatcgtcaacggtggcgatgccgcgaaagaacaccttgctgctggcagcacggcggtggcagttgctcacgttgaggcgaagacgcttattaccgcacagc

SEQ ID NO: 9516 - DNA, 185 bp, Triticum aestivum
  Clone ID: uC-tsrow189072h10b1
tgcttcctcctctcgaaacacccgaacggccgggtggattggattgggcagaggaggcgcccactggtggtgatggcctcctcgttgactacggcggcgcattcggtgtttcggggtggggccaaccctctggccgagctgaccgaccgtttcaggtcgctggaggtcggggtgcgctagtggat

SEQ ID NO: 9517 - DNA, 237 bp, Triticum aestivum
  Clone ID: uC-tsrow189072h11b1
tgttaaaggaggaggccatggaagagagcgatgatgacatgggcttcagcttgtttgactaagcagttcaattccagctctcctgtggaatctgctatgctaaagattacctatcttatgtgcttttaggttgaattttgcggatttgatatgtaattctgttgagacctaagtatctgtgcaatgagtactgcaaaccaccttgggatggtctttttagaatgaaaatggttctac

SEQ ID NO: 9518 - DNA, 321 bp, Triticum aestivum
  Clone ID: uC-tsrow189074a01b1
cgctctccaaggtcccaaggctccagatctccctctctcgcagctacctcggtggcctttggagcgcacgagatggcggaagaagccccagcaccagttgttgccccagcagaggcacctaccccggttcttggtgagccaatggacttgatgactgctctacagcttgtcatgaagaagtcaagtgctcatgatggccttgtgaaggggctccgtgaggctgccaagtccattgagaagcatgctgctcagctttgtgtgctggctgaggattgtgaccagcctgattacgtgaagctcgttaaggcactatgcgctgag

SEQ ID NO: 9519 - DNA, 279 bp, Triticum aestivum
  Clone ID: uC-tsrow189074a03b1
tttgttattcgtgggttgttggtggtctttctgtctgtcatttgtacctgatgagcaccaaccagactacctacgagaacttcaggtatcggtacgaccggcgggctaacccgtataacgtaggtgtggtgaacaactttctggagatcttgtgcactgctgtccccgcttccaagaacaatttccgagctagggtcccagtagagcaaggtttacagcaatcacgcccaccaaccaggggtttcatgagcccaaacatgggcaaacctgttggagacc

SEQ ID NO: 9520 - DNA, 392 bp, Triticum aestivum
  Clone ID: uC-tsrow189074a04b1
tgctttttttggttctaagcttcagaagaagatgcgggactctaatatttttgttgtgggatctggtgctcttggatgtgaattcttgaagaactttgctttaatgggggtttcttgtggccgtaaagggaagctaactataacagatgatgatgtcattgagaaaagcaacttgagccggcaattcctgtttcgtgattggaacattggacaggcaaaatctacagtagccgctacagctgctagtgctatcaactccagcctccatattgatgctcttcagaatcgtgcctgtccagagactgaacatgttttcaatgatgcattctgggagggccttgatgctgtcatcaatgcacttgataatgtcaatgctaggatgtacatggaca

SEQ ID NO: 9521 - DNA, 432 bp, Triticum aestivum
  Clone ID: uC-tsrow189074a05b1
tgctacgcgtccggtgcgagattgcctccaattgatgagcatgttattagcatgaaactggttactcctgccaaagggacgatagagttatcaagggagaaaaatcctgatttattttatcttgcccgctgtggacttggtggcctaggagtcgttgcagaagttactcttcagtgtgtagaaagacaccaacttgttgagcatactcttgtttctaatgcagatgaaatcaagaaaaaccaccagaattggctttctgaaaacaaacatatcaaatacttgtggattccatatactgatacagttgtcgttgtccaatgtaatcctccttcaagatggaaaactccaaagttggcatcaaaatatgtaaaggatgaagccctacagcatgttcgtgacctttaccgagagtcattgaagaaatatagaact

SEQ ID NO: 9522 - DNA, 267 bp, Triticum aestivum
  Clone ID: uC-tsrow189074a06b1
caaatccccaacccgccggcgatggctctcgtctgccgccccgggaggaacggcggcggcggcggcgggtgcgcgcgctgcttcctgggattcctgctcaagttcctcgccttcctccaggtcttcgccgccgtctccgccgtgctctacgccgtctccatcctctcccgctgggcgcggcaccacgagctgcacttcgaccaccttctcccagacctatggttcgcgtgcgtcgtcatggccgccggcctcctttactgcgccatc

SEQ ID NO: 9523 - DNA, 112 bp, Triticum aestivum
  Clone ID: uC-tsrow189074a07b1
ttctgctgacgcgtgggcggacacatgcgctaatgcagatgtacgttccatggaccccggcgacgcgccctcgcaagagttgttcaaccgcacggaccatccacgcgggcag

SEQ ID NO: 9524 - DNA, 194 bp, Triticum aestivum
  Clone ID: uC-tsrow189074a08b1
gcccacgtggccggacaacatggtgatcgttcttagaaactggctcagaaagcattgcaagagccaggtcggctgggccgtccccacagccgatcagctgccggtgactccaaccaaagacaagctcatggagagtgcaggagctgcagcgcggcgtttgaaggccatgaaggctctggaggtcgccctgcagt

SEQ ID NO: 9525 - DNA, 354 bp, Triticum aestivum
  Clone ID: uC-tsrow189074a12b1
tttctgcgaatattttggttactgcctctgctgtggcagcctctttgctggaccagtatatgagatgaaagattaccttgaatggactgaaaggaaaggaatatgggccagctcaactccttcaccattattacctactctgcgtgctctagttcaggctggaatatgcatggggttatatttgtatctgtcacctatgtttccgctttcacgatttagtgaacctctatattatgaatggggtttctggcaccggctcttctttcaatacatgtcaggatttactgctcgttggaaatactactttatatggtcaatctcagaagctgcaattattatatctggcctgggttt

SEQ ID NO: 9526 - DNA, 148 bp, Triticum aestivum
  Clone ID: uC-tsrow189074b02b1
ttcttctttgctgttcgtctccacattattctctccggcggctgttactcgactctcggcgaggggcggagatgtcctacctactcccgcacctgcactctggctgggcggtggaccaggccatcctcgccgaggaggagcggctcgt

SEQ ID NO: 9527 - DNA, 279 bp, Triticum aestivum
  Clone ID: uC-tsrow189074b03b1
tttgttctcgtccgggcagaatttaacagggattaccagggtttcatggttccaaacaaaagaacattcccctctggcatcaaggcgcttgcagattatgtgcacgccaaagggttgaagctcggtatctacagtgatgctgggacacaaacatgttgtaacaaaatgccaggatcgctcgatcacgaagagcaagacgtgaagacttttgcgccttggggagttgattatctgaagtacgacaactgcaatgatgctggcagaagtgtcaacgaaaga

SEQ ID NO: 9528 - DNA, 203 bp, Triticum aestivum
  Clone ID: uC-tsrow189074b04b1
ccctccgcaggtcaagctcggcagctccagctccacctcgaaaccgaagccgccgccgccgccgtcggcagcggaggaggaggaggaggaggagggagatggcgtctggcctggtgactgatgacgtgacagtggggcggctggtccggatccggcgcacggtgatgcacatgctgcgcgaccggggctacctggtggtggag

SEQ ID NO: 9529 - DNA, 363 bp, Triticum aestivum
  Clone ID: uC-tsrow189074b05b1
tgctagtatggaagtcactcaaggtccaatgggatgactcggtcgcaatttgcaacggccctgagagggtttctccttgggaaattgactcatctgatgcctcctcacctgccatcagtgcactgctgcaatcatcggcgaagaacaagcgtccaagggagacaaatgaaaactttgatcttccatcacaggagccgactcaggagttttggctgtctggaatgacacagcagcatgagaggacatatgttggttctagtgaccccaaccgtatctctgggtatcatcaaattctttggccaagcagtgatacccgcagggtatggtgccatgagcagcagttcggtttgtcaaactccattg

SEQ ID NO: 9530 - DNA, 386 bp, Triticum aestivum
  Clone ID: uC-tsrow189074b06b1
ttcttcagcaaaacgctgcagttcgagcacaagctcttctacttcgatctgaaggagaacccgcgggggaggtacctcaagatctccgagaagacctccaccacgcgctccaccatcatcgtgcccatcgccggcgtcgcctggttcctcgacctcttcgactattacatccgcaccgacgtgcgcgacgtcttcagcaaggagctacgcctcgacaccaaggtgttctacttcgatattggggagaacaagagaggccgctaccttaaggtttcggaggcatctgtcaatagaaaccgtagcacgataattgttccggctggtagctctggcgaagaaggttgggaagcatttaggaatgtactgttagaaatcaatgatgaagc

SEQ ID NO: 9531 - DNA, 210 bp, Triticum aestivum
  Clone ID: uC-tsrow189074b08b1
tgtttctgcaagcattgagggtgatgtaaaaaatctctgggagggtaagacttccacagcgctagaagagatgcaaaatcaaattgagtaccagatgcgctctggaactgcaaaagtagatgtatactggctggccatcttaaaacgccttcatatatacaaagcaaaggcttgcctgctggaaatccatgctcctctcttacgtaagca

SEQ ID NO: 9532 - DNA, 348 bp, Triticum aestivum
  Clone ID: uC-tsrow189074b09b1
tttctgtctgctctacccgcttctaacaaacgcgcgcacactccctctcgctctcgcggcgcaggtcggaggctaaaaccctagacacaggcgactatgacggcgccggcggacaaggggaagaaggccaagaccgacaccgacgtcggcgaggagaacgagcagatcgacggtgccctcgtcctctccatcgagaggctccaggagatccaggacgagctcgagaaggttaatgaagaagcaagtgataaggctttggaggttgagcagaagtacagtgagattcgcagacctgtctatcttcggaggtgtgacatcatcaaaacaattccagacttttggctgaca

SEQ ID NO: 9533 - DNA, 361 bp, Triticum aestivum
  Clone ID: uC-tsrow189074b11b1
ttcaaaatggtgcaaagatatatttgtagcatttgtcgcgttattggacaaacatatagcaactggtacttttgatgaggaaattataccaattggccgtccagtgaaatctttgatggtggtcctgtcttggtcatgtctcctcctatatggtgctcatagattcttacagtggacccagctcttgtcgacgtggaaaggagtgatcctctttgcttctggattggcaatggtaacctgccgtatgcatgtattcatcatgttctcgcaggccgagcgctcaagctctgcgaaagcagcatgggaccgagtgaagaaggattgatagctcgtgtgaatttcagtctataggggaactgcc

SEQ ID NO: 9534 - DNA, 366 bp, Triticum aestivum
  Clone ID: uC-tsrow189074b12b1
tgcgttcgtttcaaaatggtgcaaagatatatttgtagcatttgtcgcgttattggacaaacatatagcaactggtacttttgatgaggaaattataccaattggccgtccagtgaaatctttgatggtggtcctgtcttggtcatgtctcctcctatatggtgctcatagattcttacagtggacccagctcttgtcgacgtggaaaggagtgatcctctttgcttctggattggcaatggtaaccgccgttatgcatgtattcatcatgttctcgcaagccgagcgctcaagctctgccaaagcagcaagggaccgagtgaagaaggattgatagctcgtgtgaaattcagtctataggggaac

SEQ ID NO: 9535 - DNA, 198 bp, Triticum aestivum
  Clone ID: uC-tsrow189074c02b1
gttggaacaaataaaagttctaatacagtaacagatgtctgctcttcagccttttgatcgcagtaaccttaacagattcagttcaactgatcagttgccattgcaccgacacatattctcgcggatgataaaaccgacagtaacaaaacggtccgattgctttagcaagtaacgaaaacaaccactttgacatgaatt

SEQ ID NO: 9536 - DNA, 367 bp, Triticum aestivum
  Clone ID: uC-tsrow189074c03b1
ttcttctccctccaccaccgccgcgacggcgaccccccattctcacgccgaagcgaccccctccgccccgaccgcgtctctccagccctagggtttccgcctcctttccgcccatagccatctccacgcggcacgccgcagccccgcggattcctccccccttttcgagctcaaaattgcggcttttccgctcgattctcgggcacgaatcggccattgatttcctccggttatccaaggttttcccctgatttttcgcggcgcgagcgggggcttcccgaggcgattggtgctctggagcggtctcttgtccgccgcgggttcgggctgcggctgaaggcctcgccgatttttccatgagcgtggg

SEQ ID NO: 9537 - DNA, 350 bp, Triticum aestivum
  Clone ID: uC-tsrow189074c04b1
tgattaaatcagccgccggcgccgcacattgtgggggcatagtaatatcatcatccaatcctcacaagaggacgaggagggggcacaagggtgttctgcagcttcaccatctgcctcttgatactttaagtgacattgtgtcattgttaagcttcaaagaggctgcgcgcatgagcgtactgtccagccagtggagacatctctggagatcatgtatcagagacctggtcttcactagggagacaatgtgctgccccatgcccatgagccgagtggaacatgatcgagaagctttcatcaggaatgttgagtgcgtattgtgccaacttgatcccaccattgctagggac

SEQ ID NO: 9538 - DNA, 367 bp, Triticum aestivum
  Clone ID: uC-tsrow189074c08b1
tgtcttttgcccacgcgtccgcccacgcgtccggtgcgccattatctacagccacagctcaacacatcacttgcaccggtcgagtccttgatcatcacagcaatggccttcaccgacagttggacccacgagatcgaatcgccggtcgccgcgtcgcgcctcttccgtgccggcgtcatggactggcacacactggcccctaagctcgcaccgcacatcgtcgccagcgcccaccccgtcgagggcgaaggcggcatcggcagcgtcaggcagttcaacttcacctcagccatgcccttcagcctcatgaaggagaggctcgagttcatcgacgccgacaagtgcgagtgcaagtccaccctcatcg

SEQ ID NO: 9539 - DNA, 399 bp, Triticum aestivum
  Clone ID: uC-tsrow189074c09b1
tcttttctgccgttgcccgaccaacaaacactctgcctccttccttctgcttctcccccgcccgtcctctgatcccgcctccgatggactccgccgcggcgtcgtccctcgtcgtcagccccgcctccgacgaccgcttctgggacggcctgcgcacccgcgtcgacaccatcatcgaggaccgccgcctcgtcgcctccgccgcgtccacgtgcgcggcggcgtccgggcggcccaagcggctccgggaggactcgctgatgctggtccgtggcctcgactccgtcgccgcgtccctcgcgcagctctccgacaccctcaccgccgcccagaagggcgtgaacgctctggccatgtgctcgttccaggcgagggaacgcgagagcggggaggaggagc

SEQ ID NO: 9540 - DNA, 278 bp, Triticum aestivum
  Clone ID: uC-tsrow189074c10b1
cgatcccccctccctcacaagttctgctatcctggatccatccagaaaagcaggttggtccgcagcctggtcggtaaggcgctccgtccctgcccggagttgatgcgcgccgccgtccgaatctctgcgcgaggcaggccggtcaaccgatccatccggccatggcgtgcaggggcttcttcgagtgcgtcctcaagctgctcaacctcgtcctcatggctgtcgggctggccatggcgggctacggcgcctacctgctcgtgctctggctccagctg

SEQ ID NO: 9541 - DNA, 432 bp, Triticum aestivum
  Clone ID: uC-tsrow189074c12b1
tgttgtccacgcgtgcgtccacgcgtgcgccacaagccgcctccaccgcccgctgggaggggcacagaactcctgtgtatcggagggttgcgcgaatcgccatctccagcaaccaatccccaaccctcgagctatctaactatcccgatcccgatctcctaccatggtgtccgatgccagcaagaagaaagccgcgcagaagaaggccgccgccgccgcaaagaggggagccaagtccagcgccgctgcctcgtcctcgtcggcgtcgtcagcggccgataaggccgccaatggcatagcggcccttaacttatccgatcggacatgtaccggggtcctggcttcgcatccgctctcccgtgatatccacattgagtccctttcattaacatttcatggacatgaccttattgtggattcagaattggagct

SEQ ID NO: 9542 - DNA, 286 bp, Triticum aestivum
  Clone ID: uC-tsrow189074d01b1
ttggtctcggaaacacttaagttctgcaccatgctcactgtgttgtccatacgtaactgccagcttttgcactctctatcctcattgcagtattttgatccactaaaagttctggtgatcgagagatgtcctataattactgcaacatcatttccgttgaactttaggagcctttcatctctcaaagcgttgagaatatcatactgctcagagctccaatctttaccagcgtacggtctgccatcctcattggaaacacttcatattattgggtgccacccggagt

SEQ ID NO: 9543 - DNA, 269 bp, Triticum aestivum
  Clone ID: uC-tsrow189074d02b1
tttctatcccctcgcttcgtacggcgaagcagccagagcctgagcccaccttccagaatcaacccgcccgccatggcgagcttcgcgaggcaggagcaccagttcctcgccgagctcggcctcgcgccgcgcaacccgggctccttcgcctgcggcgcctggggcggctcgggccccgtcgtcaccaccaccaaccctagcaacaacgaggtcattgctgaggtcgttgaggcgtccatggacgactacgagaagggcatgagcgcctg

SEQ ID NO: 9544 - DNA, 308 bp, Triticum aestivum
  Clone ID: uC-tsrow189074d07b1
tttctgtgagtgagtacaagtgttgagattgcacttaggtgtgtggacaaggaccgaaaaaaaaggccatgtatcaatgatgttgtccttgaactggagaaactagaagctaagattaaggaaatgtcactagcttttgatgtgccaaaagacctcacagtccagagaagctgtgacaccaacattatgtctgtggatccaaccatggagctgcggtttctctttgagcaagggaaggaggcgtcgtgctgcctgcagctgaccaacaagacgggtggattcatcgcattcaacatagagatcaaccc

SEQ ID NO: 9545 - DNA, 174 bp, Triticum aestivum
  Clone ID: uC-tsrow189074d08b1
tgtctttctgtgaacagggacctcagtattcctggccgtgagctatctggagttcatcctgccatggaattcctgcacgcaaattccaaaagtttgcttgatagcaacctggaggatggaagatgcatatctgcccagggtaagaaggcggtggtcattggtggtggagacaca

SEQ ID NO: 9546 - DNA, 285 bp, Triticum aestivum
  Clone ID: uC-tsrow189074d09b1
ttcttttggagacgaagaatgagaagccaccatcttctccatcagatatattgtctccagaacaaaggaagattccgatagctgatgctccatcttcccagtgtggtttgttatctagagaccaaaggaaagctccacccgtagattttattaagccatctgaaccacctgcgtgtcatatggaagctgatatggtgatcactgctgcaactccctcctcggaggctcaaggtactactggtaaaaaagggctacttgaaaggattcagatactatggactggtc

SEQ ID NO: 9547 - DNA, 194 bp, Triticum aestivum
  Clone ID: uC-tsrow189074d11b1
tctttctcccacgcgtccgcccacgcgtccgcccacgcgttcgttgacgcgtggggccgtcagcagctgcacaaaggctcctcaaaccctaaccctagtcctagcttagcttccttcttctcgatctagctagagccatggcgccgaccatgggcgaggggccggccatcggcatctacctcggcaccacctac

SEQ ID NO: 9548 - DNA, 320 bp, Triticum aestivum
  Clone ID: uC-tsrow189074d12b1
tttgttccccacgcgtccgcccacgcgtccgcccacgcgttcgcccacgcgtccgcccacgcgtccgcccacgcgtccggttctgacgtgctcctccatgtctcccgcgagttcttggtgtggcgatcatggctccagatagcataaaatcgacatcatgggtgtcggtgcagaatgacggaggagcgggagaagcaggagctgctcggacgcgctagcgccagtgagatcttccagcatgcgccgacggacaagccggctttcacgctggcccagatcaaggaggcaatcccggctcactactttcagtgctcgttgat

SEQ ID NO: 9549 - DNA, 376 bp, Triticum aestivum
  Clone ID: uC-tsrow189074e01b1
ttgctctgacagctggatcgagcattggaaatatccaacatatgatcacaaagaattactattatcccattcctccgggaattgggcgcacaactcagagcgctcaaattggatatggtaaagccactgtagcggcttatggctacaattggaatgcaaataatccaatagactggatttccgatatgtttgtcggagtccgagggtctacggttttgcatgccaatgttgtgggacaaagcggtaatacagtccaggtgaattccttttctgctgcacgtgcttatgtcccattgcccaatcttccgggaaactccaatacgatttctacttcggtttccgtcactgctggtctcattaatgatatcagtcgcga

SEQ ID NO: 9550 - DNA, 246 bp, Triticum aestivum
  Clone ID: uC-tsrow189074e03b1
tttctgtcgcgtgggcggctgccctcggagttcgcgcggtggggcgccggcgagatgggcagcgtggacccgtaccagatcacctgcgactaccggacgctgttcgtctccgactggacgcggctgggcttcgccgaggtggactacgggtggggcccccccgcccacgtcgtgcccctgacaaacctggactacatcggcacgtgcatcctcgtcaagccctgggtacacaagccaggcgcccgg

SEQ ID NO: 9551 - DNA, 341 bp, Triticum aestivum
  Clone ID: uC-tsrow189074e05b1
tttttgtcacataaaattccagtcaagggaaaagtggtgcaagaatgagtttgtcatctccctgagtgagacagccaatgagttcaggtcatgatacacctaaaactgcatgagctccctccgtaacatgtgctcaagcgatggactagagatgcaagagatatactactaccggagtatttgcgctaccagaaggaccatgggcccctgaagtattcttctcgtcgacacaacactttatacttgttggcagtggatgtggttaagttaggtgacaacaatgtggaagcatatgcacttgcaatggagaaaatgcgagatgtcaaagtgctccccgagcc

SEQ ID NO: 9552 - DNA, 360 bp, Triticum aestivum
  Clone ID: uC-tsrow189074e10b1
ccgcctgcggtccggtccggattcctgggtcgcccactgctcctcccacgcgtccgcggacgcgtgggtttggatctctctcacctgccattgctttccatcgtccagcgcgccaccaccccttccacgctccagcgtgccgctggcccacaccacgcgttgccgcagccggcccacgcccctccgtcgtgcgccgtcaccgccggccgcctgcccgttcccccgttcctccggctgtgcgaggcacggtggcggtgggaggaaaactggcggatctgggcgcggccttgagagatctcgcggctggtgcggcagcttgctacgatggcagcgacttgtgaggcagccatacaacgtacc

SEQ ID NO: 9553 - DNA, 115 bp, Triticum aestivum
  Clone ID: uC-tsrow189074e11b1
ctgaagccgcaccggtctgaagctgcatggctttagctggagcggggatggcaagctgcatcgactgccacccttgctctcggggtctgcagggaactgccgctgatgatgatga

SEQ ID NO: 9554 - DNA, 408 bp, Triticum aestivum
  Clone ID: uC-tsrow189074e12b1
ctgctcctcccccgcaacaaatcttggtcgcttcgccgccggcacaagcgatcggagcagcggcccgtcggcagcgatgggggaccacgaggcgcgcggtgacgacacggagaggaaggcggataagaagctctccggctgggggctcttcggctccaagtacgaggacgccgtcgtcctatacgataaggccgccaactttttcaagctttcgaagaactggaaccgagctgcatctgtgtatatcaagattgctaattgccatctgaagggtgatagtaagcatgaagctgcctcagcttatgtggaagctgcaaactgctacaaaaaattctcacctcaggaagctgcgcaagcgctagaccaggctgttaatctatttctggaaattggtagattgagcatggc

SEQ ID NO: 9555 - DNA, 317 bp, Triticum aestivum
  Clone ID: uC-tsrow189074f01b1
ttgctgtcgcgtgggcggacgcgtgggggtgaccaaccatgtttcaaagcgccgtgcaacacaatcaagatgtcaactctctcggtctcatctcctccaggaagaccgccgaggccattgacatactcaagctcatgtcctccacattcatggtcgccttgtgccaagccatcgacctccgccatcttgaggagaatgtcaaggatgccgccaagagctgcgtgaagatgacggccaggaagacattgagcaccaccaacaatgggcacctccacaatgcgcgattctgcgagaaagacctgctgctcacgattgac

SEQ ID NO: 9556 - DNA, 99 bp, Triticum aestivum
  Clone ID: uC-tsrow189074f03b1
ttctttgtgacgaagaactaacacttcgctagctgtgatagaaaacaaacattgaaaacatagacgctcacaccatggcaaccaatgggtactccaatg

SEQ ID NO: 9557 - DNA, 407 bp, Triticum aestivum
  Clone ID: uC-tsrow189074f04b1
ttggtctcttctcccgtcccgtcccgtccccagccaacctcctatctccgtctcgcgtcgcggcggcagttccactccctcgccatgggcaagattaagatcggaatcaacggtttcggaaggatcgggaggctcgtcgccagggtagccctccagagcgacgatgtcgagctcgtcgccgtcaacgaccccttcatcaccaccgagtacatgacctacatgttcaagtacgacaccgttcacggccactggaagcacattgacatcaagctcaaggacgacaagactctgctctttggcgagaagccagttaccgtcttcagcgtcaggaaccctgaggagatcccgtggggtgaggctggtgccgattacgttgtggagtccaccggtgtcttcactgacaagga

SEQ ID NO: 9558 - DNA, 291 bp, Triticum aestivum
  Clone ID: uC-tsrow189074f05b1
tgtttcttcctccgcatcggcagcctcacctggctctcattgctctacttcgagatagagggccactccatgatggtcgtggaggccgacgggcactacgtgcggtcgttcgcggtgaggggcctcttcatctactccggcgagacgtactccgtgctggtcaaggccgaccaggacccgcggagaaactactgggctgcgtcccacgtcgtcggccgcaaccccagccagacaccgaccggcaaggccgtcgtgagctacgccttcaacggcaacaacccgtggatgcct

SEQ ID NO: 9559 - DNA, 391 bp, Triticum aestivum
  Clone ID: uC-tsrow189074f07b1
tttctcgcggacgcgtgggcggacgcgtgggtcggacgcgtgggtccctccgttccaacttccaaccgacgccaacgacttcaacttcactccgttccgttcaaactttccggccgcggcaacgtgcgactgaccgaccgactggaagctccgcctcgcacgcctcttctcgttcacaggatggttctgcccatgtcgcgggcgacgaggctggtgccggagctgccgctgctgcggcgggggaggcgcccgctggtggcggacgctgggaacgaggaggagctggccgtgccggcgcacttccggtgcccgatctcgctggagctgatgaaggacccggtcacggcgcccacggggatcacctacgaccgggagagcgtggaggggtggc

SEQ ID NO: 9560 - DNA, 328 bp, Triticum aestivum
  Clone ID: uC-tsrow189074f08b1
tcttttgcccacgcgtccggaaaaacacaaagaaacaacagcgcgccgctccagctccagctcccgaggcagctcaccggcggccaccgttcgacccctcccccgcccattcccgcggcgctcccctccgcccgctcgccgccggctggtgatgctacgggcccccggccccgccgcggcgacaccggctcgcagctagatctggcccgcaggaggttcccgggcggcatggggcggttcgcagggctgcggtggctcctcctgctgtgggtggcagcaggggcgctggccgcggaggaggatagcaaggcggccgtcggggcgcccg

SEQ ID NO: 9561 - DNA, 393 bp, Triticum aestivum
  Clone ID: uC-tsrow189074f09b1
ggcgctgggatcgctgaggctgaaccagctaaacctgtcatccaatgacctcgccggcgaggtcccggaggcgctcgctgtccccgcctacgaccgaagcttcctgggcaaccgcgcgctctgcacgggcgcggcgtcgtcggggaacctcgccggcgtgggctcgtgcgcagcccggtcatccgacaaggtgtcaccaggcctccgcatcggccttgtcgccgctgccgccgcgctactcgtcgtcatcgcggcgctcgccttcttcatcgtccgcgacatgaagaggcggaaggggctcgcgccgcccgaagaggcctggaagctcacccctttccagccgctggacttcggcgagggccccgtgctgcgcgggctcgtcgacgagaacct

SEQ ID NO: 9562 - DNA, 395 bp, Triticum aestivum
  Clone ID: uC-tsrow189074f10b1
ttcttaggagatcaaggcgtactcgggcggatcagggatcggcgatggatttcgagctgcggagcgcgcgggagaagctggagagggagcagcgggagcggatgcagcgcgctaaggccaaagccgaccgcgagcgccgcgccaaggccgaggccgcgcgccgccgcgacgcgctcgaggcctcaaacagggagcgccgcctcgacgccgcccgggcgcaggaagaggctgaccagaaaatggaagaggtgatgcaactaggaaaggggatctctttttcacacatgtttgaagcactgcgatatgacggtccaggggataagattaagctgccaccatcttctttcaaggatttatccgatcaaggagcgcttgacaaaggtcccatgtacttc

SEQ ID NO: 9563 - DNA, 308 bp, Triticum aestivum
  Clone ID: uC-tsrow189074f12b1
tttttgtcacgcgtccggtgggccacgtcccgaccgtgattctggcgaccagtgagcccgtgcgagaggcacgacattctcaggtcggccacaccccgacaaccaggttctcggggttctgcaagcccgtgtggccgacacggcactcttcaacaagtctcaacttggaggcaatgaagagacggtcatggggtggcaaggcctcgaccgagactacggcgaccatagagtccgtgcaggaggcacaacactctctggtcggctatgccgcgaccccgacgcgctcggggtccatcgagtccgtgcgg

SEQ ID NO: 9564 - DNA, 440 bp, Triticum aestivum
  Clone ID: uC-tsrow189074g01b1
tgctcgatctctctcccgctctcttctccccaccaccacccgagtcgtcgtctccgtcgccggccgccatggctccgggcctctacaccgacatcggcaagaagaccagagatctgctctacagggactactgcacgcaccagaagttcaccctcaccacatgcacccccgagggcgtcgcaatcacagctgcaggaactaggaaaaacgagtcaatctttggcgagcttcagacccagcttaagaacaagaacttgacagttgatatcaaagcaaactcagagtcagatcttctgacaacattcacagttgatgagtttgcaactccagggctgaaatcaattctcagcttggttgttccagaccagaggtcagggaagcttgaactccagtatctccatgaattcgccggtgtcaatgcaagcgttgggctgaacccc

SEQ ID NO: 9565 - DNA, 374 bp, Triticum aestivum
  Clone ID: uC-tsrow189074g03b1
tggtatgcaaaggttttcaaggagttggtagtatcaaccacatcaagggcacttgtccatgcattcttcgcccagcgttccaccactaaggtaccaggtgttactgatattcaactcaaacctaggaacataagaaaagttgctgttattggtggtggtcttatgggttctggaattgcaacagcccttcttgttggcaatatatctgttgtcctcaaggaagtaaaccctcaatttttgcaaaggggacaaaaaacaatagcaggaaatctggagggccttgtcaaaagaggctcattgaccaaggataaaatgagcaaggccatatcacttctcaagggtgcattggattattcagatttcaaggatgttga

SEQ ID NO: 9566 - DNA, 251 bp, Triticum aestivum
  Clone ID: uC-tsrow189074g05b1
tggctccgtgctgcccatggacggggatgaggtcctcgtggcttccgctgacgacgaccacgacgacgatgcccggccgcgccccggggagaggctgggctcgtacgtccgcgacaaggtcggccgcgcgctgtcctgcctccgctgcggctgccgtgactcccggtcggcggtgggcttcgaggacatggacggcgtctacgaggttggggccaggaagatcagaggcgcggcggggcccagggtgttca

SEQ ID NO: 9567 - DNA, 216 bp, Triticum aestivum
  Clone ID: uC-tsrow189074g06b1
tattccaccatcaccagggccaggtttgaggagctcaacatggacctcttcatgaagtgcatggagccagtggagaagtgcctgagggatgccaagatggacaagagcaccatccatgatttcgtgcttgttggtggttccaccataatccccagagttcagcagctgttgccggacttcttcaacgggaaggagctctgcaagagcatcaaccct

SEQ ID NO: 9568 - DNA, 283 bp, Triticum aestivum
  Clone ID: uC-tsrow189074g09b1
agattcactacgagacaactgggcctgaattcttgaaaggcacaggcggaaagatcgatggcctagtttctggcatctggacaggcggtaccattactggaactggtaagttcctcaaagagcaaaactctaacatcaagctctacggtgtggagcctacctagagtgctgtcttaaatggtggaaagcctggaccacacaagatccaaggaattggagctggttttattcctggtgtcttggatgttgacatcattgatgaaaccatacaggtttcaagtga

SEQ ID NO: 9569 - DNA, 267 bp, Triticum aestivum
  Clone ID: uC-tsrow189074g10b1
cacagccacttcacgataaaaaggcccttttaaagaagccacctgctggtgctcccgcccctgcgcctgtttcggctgttgatgcttatcagaagatgctttcatctatcgctgagttctctgggtttggaaggctcttcaagttctcagaacctgtggagctgacagaggcagagactgaatatgcagctaatgtggctaagcatatctatgaaaaccatgttgtattgcagtacaactgtacaaacaccatacctgaacaactgc

SEQ ID NO: 9570 - DNA, 344 bp, Triticum aestivum
  Clone ID: uC-tsrow189074g11b1
tttttgtggacgcgtgggcggacgcgtggcactccggtctttctgttcttctccctgcatccatcggctcaaccatccactgctccgaccgactctacaatctagtacatacgtgcatgatggcatcgcgcaccatgtgggtgaacggccccatcatcgtgggcgcggggccggcgggcatcgcggcggcggcctgcctgcacacgcgcggagtcccctccgtcgtcctcgaccgcgacgactgcctcgcctcgctctggcagcgccgcacctacgaccgcctgcgccttcaccttcccaagcacttttggcagctccccgggatgcccttccccgaccactac

SEQ ID NO: 9571 - DNA, 247 bp, Triticum aestivum
  Clone ID: uC-tsrow189074g12b1
cccatcaagtacccgtccgagaggagggtctttcagtccctcctcgtcttcgtgaacagcctcagatgagtggtcagagaaccggagaaccatcgttctctgcattggtaccggcggtgtctaggcattattatgtagtggtagcgagagaggatggatcaacggaaatgttggagacagaggagtgtggggacgcatggacagcggctcaaagcccctccattataagggggcggggatttgtgtg

SEQ ID NO: 9572 - DNA, 288 bp, Triticum aestivum
  Clone ID: uC-tsrow189074h01b1
catatcatatctggcatgatccatgacttattatcagaaaaaactaagctttcggcgactaaagaatattgccggccgaatgaccctgcagcaggaacagggacatggcatctacaacttaattgcccaaaaaagcatcgttctaactgaacaggaccataacaagatatcccccaaagaaaggtacatggtgcctcatccaacagtgcattcctcctgagctgaccgactgattattcagcatttcagcatgtatgttagtatgtgctcggtgacattgcggtattc

SEQ ID NO: 9573 - DNA, 211 bp, Triticum aestivum
  Clone ID: uC-tsrow189074h05b1
ggaccctatcttccactgcccataccacctttttgattgattcactcttttcgggagtcgatttctattccaccatcacctgggccaggtttgaggagctcaacatggacctcctcaggaagtgcatggagccagtggagaagtgcctgagggatgccaagatggtcaagatcaccatccatgatgtcttgcttgttggtggttccaccag

SEQ ID NO: 9574 - DNA, 408 bp, Triticum aestivum
  Clone ID: uC-tsrow189074h06b1
ttgatatctttggcaattatgcaaatgccatcaagtggtccagtgcctggcccaacaacaaacttgaacataggaatggactactgggcaaatacagcaagctcctctcctgcattgcatggtaaagtgaccccaactgcaattccaggggctgtggccccaacagagccgtggatgcaggatgaacgtgaactgaaaaggcagaaaagaaagcagtcaaacagggattctgctcgcagatctaggctgcgcaagcaggctgaatgtgaggagttggctcagcgcgctgaagtattgaaacaggaaaatgcttcacttaaagatgaagtgagccggatcagaaaggagtacgatgaacttctgtcaaagaatagctcactgaaggataacgttggagacaaacaacac

SEQ ID NO: 9575 - DNA, 318 bp, Triticum aestivum
  Clone ID: uC-tsrow189074h07b1
tcttctgaccggagatagcccgcgccgcatcgatctgcgtttacggcctgattcctcagatcttcgcgtacgccgtcaacttccccattcagaagttcctgcaggcccagagcatcgtcctgccgagtgcttacatctcaacggcaacactcgttctacatgtgatgctgagttgggtgctcatgtacaaggtcggccttgggctgctcggtgcctcactggtgctgagtgtgagctggtggattatcgtcggagcacaatttgtgtacattgtcgtgagcccgacgtgccggcacacgtggacgggattcagttggc

SEQ ID NO: 9576 - DNA, 85 bp, Triticum aestivum
  Clone ID: uC-tsrow189074h09b1
gtcggctcaccagggaaggacccggcataccgccggtcgagccgattctcgtgagcgggtcgttcatcggtcatcacgcgatggc

SEQ ID NO: 9577 - DNA, 201 bp, Triticum aestivum
  Clone ID: uC-tsrow189075a01b2
taccttttcgcctacctgggcgggaactcttccccaagtgccggtgacgtcaagaacatccttgactcagtcggtgctgaggctgatgaagaaaagcttgagttccttcttgctgaactcaaaggcaaggacatcacagaagtgattgcatctggaagggagaagtttgccgctgcgccttcaggtgggggtgccattgct

SEQ ID NO: 9578 - DNA, 363 bp, Triticum aestivum
  Clone ID: uC-tsrow189075a02b2
gtggttccggcggcgccacgcgcgaccagctcgctgccacgctcggtgccgcggagaaaggcggggccgagggcatacacgcgctcgccgagcaggtggtgcaggtcgtgctcgccgacgcgtcgggcgccggcggcccgcgcgtcgccttcgccaacggcgtcttcgtcgacgcgtcgatcaagctcaagccttccttcaaggatctcgccgagggcaagtacaaggccgagacacagtccgtggacttccaaactaaggctgctgaagttgctggtcaagtgaactcctgggtagagaaaatcacaacaggtctcatcaaagagatcctgcctcagggtctgttgacaacaccactagact

SEQ ID NO: 9579 - DNA, 286 bp, Triticum aestivum
  Clone ID: uC-tsrow189075a05b2
cacttgagggcatatcccagatggggtggactattgaagttcatcttgcaccgcagtccaagatgtgatggagagagtgactggtaccggatcttgtccctgcccgcctttgcagatgaataggatgtgaagaagcagtacaggaagctagctctcctgctgcgccctgataagaacaagtcagtcggtgctgaggaggcctttaaactgatctctgaggcttggagtgtgttgtctgatactagttcggagacaatttatgatcagaagaggtcagatcattctg

SEQ ID NO: 9580 - DNA, 313 bp, Triticum aestivum
  Clone ID: uC-tsrow189075a06b2
tccgcccacgcgtccgcatggaccaaccatgttatggcctgttccaggcacacttatgattgaacccactgagagtgaaagcaaggctgaactagacaggttctgtgatgcccttatctctatcagggaggaaattgcacaggtagaaaatggcaaagcagatgcgcacaacaatgtcctgaagggcgctcctcacccaccccaactcctgatgggtgacgcatggactaagccatactctagggagtatgctgcgttcccggctgcatggcttcggggtgccaagttctggccaacgacatgtcgtgtggac

SEQ ID NO: 9581 - DNA, 368 bp, Triticum aestivum
  Clone ID: uC-tsrow189075a07b2
tttctgatccgcagcggctttacctaccgagaagaagagagaaaaaaggttcgagtgcgttgcagagtgagaagagatggctccggtgaagctgtacggcgcgaccctgtcgtggaacgtcaccaggtgcgtggcggcgctggaggaggccggcgtcgagtacgagctcgtccccatcaacttcggcaccggcgagcacaagagccccgaccacctcgccaggaacccctttggccaggtgccagctttgcaggatggtgacttgtacgtcttcgaatcacgtgctatttgcaagtatgcgtgccgcaagaacaagccagagctgttgaaggagggcgacatcaaggagtcagcaatggtggatgtgt

SEQ ID NO: 9582 - DNA, 347 bp, Triticum aestivum
  Clone ID: uC-tsrow189075a09b2
ttctggtaactcttattgggtaattctaccacattatggcctcggttggtgcggtgcgtccttcctcgcgcttccagaatgacacgagtactagtggtgatgccgaccgacttccgaacgagatgggcagtatgagcataagggatgacagggacactgaagatatagtagtcaacggcaatgggacggaaccgggccatattatagtcacaagcattgagggaagaaatgggcaagcaaaacagaccattagctacatggctgagcgtgtggttggtaatgggtcatttggaactgttttccaggccaagtgtcttgaaactggcgagacagtggctataaagaag

SEQ ID NO: 9583 - DNA, 338 bp, Triticum aestivum
  Clone ID: uC-tsrow189075a10b2
ccacgcgtccgatcaacggcaatggcaggccaggcagagaaggtgtttgtccccaccgacacggagctgctccaggcgcagtcggacctgtggcgccacaccctctgctacctcacgcctatggcgctccggtgcgccgtcgaccttggcgtccccactgccattcaccgcctcggcggcgccgcgtccccatccgaactcgtcgccgccctatccctccccacgtccaagctgcccttcctcgcccgcctgctgcgccaactcgccacggcgggcgtcttcagtgcaaccgacgccggaacgtaccgcctcaacccgctctcgtacctcctggtaga

SEQ ID NO: 9584 - DNA, 415 bp, Triticum aestivum
  Clone ID: uC-tsrow189075a11b2
caccacaccagactctagaaaaaggaagaaacaaactcaacctcccacccccaacagaagagccgcaaatctgccaccactccgtcgtctcccagccccgccgcccacgcatccgcctcctccctcctccctcccctagacctaccccgccgccctcctcgcgagcgctgccgattcttcgcggaggaagggaagggatctagccacctccggggctgctgctgcggttccgttcgcgtcgccagccgccgggatctgtacctggatttccacaaggaggaaccatcttagggaatgcagagagatgtgtttgcatgctagagagctaccttgcgagggaatcggcagggtagccacccctgttcctgctttgattgaccttgatgacaccgcttcacagcagcacacaacacac

SEQ ID NO: 9585 - DNA, 366 bp, Triticum aestivum
  Clone ID: uC-tsrow189075b01b2
tggtccggggaatcggtcgtgagtgtggccgtgtggtgttttgggttgggtgatctttcatggcgtccacggcgtacgcgcgcgggtccaagccgccggccgggcccggcgagcggaggcagccgcggctggccaaggagctgagcaggatcgagcctaagaagctcgggattgggctcgtcgtcggctgctgcctcgccctcctcacctacatctccttcgcccgcctcttcgccatctactcgccggtcttcgagagcacgtccatggtgatgaagaacgcgccgcctgcgtcgacggcggtgcccagtatggaggaggccgtgccggcccagaagaagatcgaagtcgagggcggggaagatc

SEQ ID NO: 9586 - DNA, 365 bp, Triticum aestivum
  Clone ID: uC-tsrow189075b03b2
gttggttccctccccaacacgcgttccccacaaattctcccaccgaatccccaaatcgcgcgagctcctccacgaatccccctccccgatcgattcggttcggcccgactgatcgccgccggagaagaggatcaccgccaccatgtgggccgcgtcgtgcctggcgtcctgctgcgccgcgtgcgcctgcgaggcgtgccgcaccgccgtcggcagcatcggccgccgctccgcgcggatcgcctactgcggcctcttcgcgctctccctgctcgcctcctgggtgctccgcgaggtcgccgcgccgctcctccagtccatgccatggatcaaccacttccacaagacgccggaccgcgagtggt

SEQ ID NO: 9587 - DNA, 335 bp, Triticum aestivum
  Clone ID: uC-tsrow189075b04b2
gtggttccctgcccagcacgcgttccccacaagtgcttccaccgaatccccaaatcgcgcgagctcctccacgaatccccctccccgatcgattcggttcggcccgactgatcgtccgcggagaagaggatcaccgccaccatgtgggccgcgtcgtgcctggcgtcctgctgcgccgcgtgcgcctgcgaggcgtgccgcaccgccgtcggcagcatcggccgccgctccgcgcggatcgcctactgcggcctcttcgcgctctccctcctcgcctcctgggtgctccgtgaggtcgccgcgccgctccttcagtccatcccatggatcaacca

SEQ ID NO: 9588 - DNA, 173 bp, Triticum aestivum
  Clone ID: uC-tsrow189075b05b2
gtgcttcgcgtccggcagcagccgccgacggcagatgcttatagggtcgacaaaccctaaccctagtccatggatagcttagctgccttcctctggatctagctagagccatggcgcctaccaagggcgaggggccggacataggcatacacctcggcaccacctactcgtgc

SEQ ID NO: 9589 - DNA, 98 bp, Triticum aestivum
  Clone ID: uC-tsrow189075b06b2
atttgttatgtcccagccaaactccccacctgagagtgtgttctgaccggatcggcccggtaagaccgggccttggacccaaaaggaggggacatgcc

SEQ ID NO: 9590 - DNA, 375 bp, Triticum aestivum
  Clone ID: uC-tsrow189075b07b2
ttgtcccacgcgtccgctcagttcatcccgacacggcgcacgcacaggtgaacggactgggcgctggcgctaaccctaccggacatctggatcggagcagagcgccgccccgagcgtcggcgcgccacccccgcgccgcaggcacgggcccaagccaccgagcagcgtccccgcgcccgcacgctaccacgcgctcgcctcgtccttgattgctcggcacttcggcaggcacgaccaggactgcgctcggagcacgctgaccgccgtccatcgtaacggcctgggtcgcaacagacagcacgcaggggctaacgccaatccactgggcctagcctgttacatttcaaaggtcaaattctgtcatgaataccacac

SEQ ID NO: 9591 - DNA, 349 bp, Triticum aestivum
  Clone ID: uC-tsrow189075b09b2
gctccagctgggaccatggttgcatatgtgggggattatgaactgtattgcacgacatatacctttggttttgatgatggcgaaactaaccgatggacctaccgtgctggagaaagtggaaaggtccatggacttgctgagtatatcgctcaggaagagatggaatggaagatgggattctggtggtctcctgatagtaaacaccttgcatttactgaagtagattcatcttccattccactatacagaattatgcatcagggtcaaagttctggtggtctacatgctcacgaagatcatgcttatccatttgctggagcagttaatgttaaagtgcgacttggagttg

SEQ ID NO: 9592 - DNA, 289 bp, Triticum aestivum
  Clone ID: uC-tsrow189075b10b2
tgggtacccgccgctcttcctgtacatcaccggggccactgtcatggggtgcaagcaccaggcataccccggcggtcccaacgccgccaacgctgcctgcagcgccgtgggaattctcggcatcatctgggcgttcggcggcatgatcttcatgctcgcctactgcaccgacggtgtgtgcgggggacacatcaacccggcggtgaccttcgggctgttcctggcgcgcaaggggtccctggtgcgcgcgcatgctctacatcatcgcgcagtgcctgggcgccatctg

SEQ ID NO: 9593 - DNA, 400 bp, Triticum aestivum
  Clone ID: uC-tsrow189075b11b2
tgttttcccacgcgtccgagcatcgtctctcgtctcgttgaggaatcaacaaccatgggcggcggcaacgcgcagaagtccaagatggcgagggagaggaacctcgagaagctgaagggcggcaaggggagccagctcgaggccaacaagaaggccatgaacatccagtgcaagatatgcatgcagactttcatctgcaccacctctgaagcaaagtgcaaggagcacgccgaggcgaagcatccgaagagcgacctcgtccagtgcttcccccacctcaagccgtgatatatgccaaatcggacggagagagagataaaagagagagagagaagctgtcgtaatccacctagtattatcatgttccgcaatgactggttgttgacctaagcatgggtct

SEQ ID NO: 9594 - DNA, 281 bp, Triticum aestivum
  Clone ID: uC-tsrow189075c01b2
gtggtcgctcctccctctcgattccgatcggagtcgcatctagctccgccgcttgattagccggcagccccgtcccgatggcgtccaagcggatcctcaaggagctcaaggacctgcagagggatccccccacctcctgcagcgccggccctgtggcggcagatatgttccactggcaagcgacgatcatgggtacatcggaaagaccatatgctggtggtgtatctttggttactattcactttcccccagactacccattcaagccacccaaggttgca

SEQ ID NO: 9595 - DNA, 367 bp, Triticum aestivum
  Clone ID: uC-tsrow189075c05b2
tttgtttgagtgagactacctagagcactcagcaccgtttttggctcgtcgccatccgttcagtgtctcagagtctcagcgtgcgtgtctgatctgatggcggcaccagcaggagattccttcggcggcgacaagtacaggtctcacctggccggcgagggcgagaagaacaccgtttggcggcacggtgcgccgcccacctacgacgccgtgaacagcctcttcgaggccgggaggactcaggagtgggcgaaggggtcgctggaggagacggtgcagaacgcgatcaatacgtgggagatggagctgtcgcacaaggcccgcatcggggacttcaagtcggtgagccctggccggttcaccctgt

SEQ ID NO: 9596 - DNA, 71 bp, Triticum aestivum
  Clone ID: uC-tsrow189075c07b2
gagaccacgccgtgcgccacgccggctgcccccaaaaacctttcgaaaaccgtcgcgccaaccgccaccca

SEQ ID NO: 9597 - DNA, 297 bp, Triticum aestivum
  Clone ID: uC-tsrow189075c08b2
tggtcgcggcgtgcgcgacggcacctccctcgtgctgtggaagtggtgcgagggcgacaaccagcgctggaagatccttccctggtaaacgtgtcatgctgctgaagctgagttgatcgccaccgtgacccggagttggtagagatcggcctgtgatctgttgccgtgtcgttagaataaaagtcgtgtgcggttggtgatgtgtccgtgagtgtgtgtttagtttctgtcctgtcgttgtgtcctgctatggcgagctatccgatgtaataagcatttggcacttgtgcttgtttt

SEQ ID NO: 9598 - DNA, 463 bp, Triticum aestivum
  Clone ID: uC-tsrow189075c09b2
ttgtcggcaacctgcagggaatacatcggaggagccatatatgtttgtggatttgaatgctgaggccccagaatctggcgacgacgaggaagatgagattgactgggaagaaggttaaagtacagcaacaagttgctctctcttgaattcatgaagtcagttcaaagtgggatgttaaatgataataatattgccagacgtatgcatatcaaggcttgcctgcaaaaaacatttttctcccagatttgtgaaaagttactataatgtgaagtatgatactccctccgttcctaaatatttgtctttctagagatttcaacaagtgactacatacgaagcaaaatgagtgaatctacattctaaaatatgtctacatacatccgtatgttgtagtccatttgaaatgtctaaaaagacttgtatttaggaatggaggagtagtattgatgaagtatgatattga

SEQ ID NO: 9599 - DNA, 399 bp, Triticum aestivum
  Clone ID: uC-tsrow189075c10b2
cccacgcgtccgcccacgcgtccggccaaacgaaccagcgccgcagcccgcagcgcacccatcccaccaaacaaacagctagcaggcgaggcgacccgctccgacctcgagccgatgccgacgccgtacagcgcggcggcgctgcagcagcaccagcgtctggtctcctcctccggcggcctggcggcgacgggggcccacaggtgcggcgagcacgacgggacggtgccgccggaggtggcgcggcaccacgagcacgcggcgccgggggggcgctgctgctgctcggcggtggtgcagcgcgtggcggcgccggcggcggacgtgtgggccgtggtccggcgcttcgaccagccgcaggcgtacaagagcttcgtgcgcagctgcgcgctgctggac

SEQ ID NO: 9600 - DNA, 125 bp, Triticum aestivum
  Clone ID: uC-tsrow189075c12b2
cccacgcgtccgcccacgcgtccgggaaattctgctctcgcccgaacgcccaacacccaccactggcggtgatgagcaccaccgagggaaaggcggacgccgctgcgctggaggagatggcggtc

SEQ ID NO: 9601 - DNA, 92 bp, Triticum aestivum
  Clone ID: uC-tsrow189075d04b2
gtggtggtaggccacaatcagcaactgaccctgtggtacctttcctagctaggtgtggtttgtttgtttgagccaggatgttggcggtgttc

SEQ ID NO: 9602 - DNA, 285 bp, Triticum aestivum
  Clone ID: uC-tsrow189075d05b2
ttgatttagctctcgcgtccgccatggcggtcacgggccatatctcggagcaggacttggtggacgcccacaacgcggcgcgcgccgacgtgggccttggggaggtgacatgggacgctacggtggcagcctttgcgcaggactacgcggatcagcgcccgggcgactgccagctgatccatactcctgatggccggccgtacggggagaacctctacggaggcggcggcggtgggaccgagtggacggcgacggacgccgtgaattcgggggtgtcggagaagc

SEQ ID NO: 9603 - DNA, 384 bp, Triticum aestivum
  Clone ID: uC-tsrow189075d08b2
tgcgtactcggacgcgtggggccggccggcgtggggatggatcaggtggttggcttctcctgtatatagtagtggtaggtttagtgtttggtttccccctgtgggtgtctggccatgtgccgtatcggagcgtgccgctgatgccggcgagaggcattggtcggccttcggtgctcttcttcttggccatggtggcgtggtgctactggtggcagggaagatcggcgtcggcgtcttcgttaataatctcgcagttatctggctgttggagctatgaagctttcggtgctgggcttatttctttgctgcgccatggcggcggtgcggaggagttggtcgcagtgctcggcggtcggcgttccggcggtcctggagatgtggtgc

SEQ ID NO: 9604 - DNA, 455 bp, Triticum aestivum
  Clone ID: uC-tsrow189075d09b2
ttttcttctcgagctgcacacctcatctcatgtcattgccattccctccttgcgagtagcaccggcagcagcaatggccagcctcgccgacctcgtcaacctcgacctcagcgactgcaccgacaagatcatcgtcgagtacctctggattggaggatccggtatcgacatcaggagcaaagcaaggacggtgaacggccccatcacggacgcgagccagctgcccaagtggaactacgacggctccagcaccggccaggctcccggagaggacagcgaagtcatcctctacccccaggccattttcaaggacccgttcaggaggggcgacaacctccttgttatgtgtgactgctacacaccacaaggtgtgccaatccccaccaacatgaggcacaatgccgtcaagatcttcaacacccccaaggttgcagctgaggagacatggtatggaa

SEQ ID NO: 9605 - DNA, 472 bp, Triticum aestivum
  Clone ID: uC-tsrow189075d10b2
tttgtcttctcgagctgcacacctcatctcatatcattgccattccctccttgcgagtagcaccggcagcagcaatggccagcctcgccgacctcgtcaacctcgacctcagcgactgcaccgacaagatcatcgtcgagtacctctggattggaggatccggtatcgacatcaggagcaaagcaaggacggtgaacggccccatcacggacgcgagccagctgcccaagtggaactacgacggctccagcaccggccaggctcccggagaggacagcgaagtcatcctctacccccaggccattttcaaggacccgttcaggaggggcgacaacctccttgttatgtgtgactgctacacaccacaaggtgtgccaatccccaccaacaagaggcacaatgccgccaagatcttcaacacccccaaggttgcagctgaggagacatggtatggaattgagcaggagtacac

SEQ ID NO: 9606 - DNA, 218 bp, Triticum aestivum
  Clone ID: uC-tsrow189075e01b2
gcgtccatcgcgttcgcccacgcgtccgaccggagccaactaattggacatcgagaggaggaggacgtctttagactcagcccaccggaccaagagaggagaacggtcatgcttgacgacgcctccgtccacggcaaggagtgcgacttgacgaggggagtttcggatgggggaccatgtggtggtgaatgtggacggttctgcgaacaccaaggatg

SEQ ID NO: 9607 - DNA, 365 bp, Triticum aestivum
  Clone ID: uC-tsrow189075e02b2
gtgctgtcgcgtgggcgccaccgccgtggaccccaagatgggcagcctgggcaccatcgcgcccatcgccatcggcttcatcgtgggcgccaacatcctggtcggcggcgccttctccggcgcgtccatgaaccccgccgtctccttcggccccgccctcgtcagctgggagtgggggtaccagtgggtgtactgggtcggccccctcattggcggcggccttgccggcgtcatctacgagctgctcttcatttcccgcacccacgagcaggtgcccaccaccgactactaagcagcgagcttaggatcggagtcgccgtccatccgtccgtgtgatgcttcagttccccctttcttcccgtcat

SEQ ID NO: 9608 - DNA, 416 bp, Triticum aestivum
  Clone ID: uC-tsrow189075e04b2
gtggtagtcttgcaatgtttgcactggccatagtcgtgtccttggtggctgacgtcttggctcagaacaccccgcaggacttcgtcaacctgcacaaccgcgcccgcgccggggacggcgtgggtcccgtggcatgggacaacaacgtggccaggtttgcgcaggactgggcggcgcaacgcgccggcgattgccggctgcagcactccggcgggccgttcggcgagaacatcttctggggttccgggcagacgtggacggacgtcgacgcggtgaagctgtgggtggacgagaagcataactaccatcttgacagcaacacctgcgacgccggcaaggtgtgcgggcactacacgcaggtggtgtggcgcaagtcgacccgcatcggctgcgcgcgcgtggtctgcacggggaac

SEQ ID NO: 9609 - DNA, 271 bp, Triticum aestivum
  Clone ID: uC-tsrow189075e05b2
ttggtgtgacctctgttctgcaccttcccaaccggatgttgttagagtggcagacgttggacaaccgggccactcgtccgtcagctctagaacgaaggcgcagacaatacggttgctgggcttgaatactgcaaagtatcttcgatggagctggatcaagcaggccatgatatgctttcagctgaaggggtaaggatggatgctgagaaggaaacactgctacagactactgtttccttgcaagaccagcttaaggaatctcaagtggctc

SEQ ID NO: 9610 - DNA, 437 bp, Triticum aestivum
  Clone ID: uC-tsrow189075e07b2
gatgccacatggcaacccttttgggtgttacgacaaccagcagtttcaacataacattattggaggaacagatatgttccccctggtgacaaatggacatgttcaggactccctgatacttcctgaagtcgagaggcccacggaaccaaacgccgagaactttgttgcccccgcgagccagatttggatcagtgcagcgtctcgcgaaccttcacagagtggatcatctaatgccctgacggctcaatcagccggttttgaagtatgtgatgagctacgtcctatggggcaatcattgtctatgtgtgagagcactaggaaaaatgttgcaaatggaacagctgactgcagatcaaacggcaaagattacagagagaaggtactaaaagataatttgaaggatgaaagaaagagagtggccctgacacgaatgggat

SEQ ID NO: 9611 - DNA, 458 bp, Triticum aestivum
  Clone ID: uC-tsrow189075e08b2
tctttcttccacgcgtccgcccacgcgtccgcccacgcgtccgcccacgcgtccgggatcttataaagtagaacaacaatatgcctaaatccatcgtcttggcaatctgccgctacttctatctataggatgaagggtgcaagctgggccacatacccggacctgtcacctaagcctaacatctaaagccgaaggcccgactgagccatctgtcaggtccagggcacaaaccggtccgacgcactcacatgtgttgtcgccgccatcttccactcgtccatctttagagcagattgacgtgtcaaccttggcaggtcctctgccatcgatgccaccacgacgccaaacgacgacctccacctacgcgagccttggcaggtcctccgccatcgacgccaccacgacgccaaacgtcgacctccacgaacgcgagtccatctgcaagcaacggacgtaga

SEQ ID NO: 9612 - DNA, 327 bp, Triticum aestivum
  Clone ID: uC-tsrow189075e09b2
tgtggtgtcccaaggacaacgagctgatagtggaggaggactctggcggcggcgatcagcaggaggccgaggtggaggacgacgacatgaactggagcaagatttacgagggcgtcctgcgcaccaggatcgccgaggaaggccgcggctcgtcggcgctcaaccgggcgccgtccatgccggtcacgtcgtccgcaaccatgggtgacggcaacggccgccgacccgccggggtcaccgagtcaacgccgagaatgcccaggctcaggcactcccacagcacgctggagaggcactaccgctcgcacacgcccaccaagcctgacc

SEQ ID NO: 9613 - DNA, 418 bp, Triticum aestivum
  Clone ID: uC-tsrow189075e10b2
tgtttttgattctgctcctcggcggcggaaggcgaacagcgtggaaccctaaccctaaccctaaccgcgctccgatccgatccgatccgcaaggcctgcgacgatggcggattccctccgcgcggcggtcaagaggatgctgcgccggcggtgcatccaggggaggggcttcgcacccagcaccagcagcattccggaaccccccgtgccttggatgaaggatacaaccatgcatcgcaaatccagcacaagaaggaggagttgtacaatctcatcgccaaggctgtggcggagcccactaccacctggctggacaggcgactgctcaaggctctctccttgcaaatcaagcctagaccaaaggaccctcactggcgcaagataattttgaccaaggtggccacccattgtacatatg

SEQ ID NO: 9614 - DNA, 404 bp, Triticum aestivum
  Clone ID: uC-tsrow189075e11b2
cccacgcgtccgcctggaggcacctcagggagctaatcaggtggcacaagcctaggccagtaacttggcagtatgatatggtaagctgtctaaggtttagcgcatatcgggcaagagcccataggccagaatcatcgacagaatagcagcgcttcaagtcaagttctaccaggctcttacagccaatgacaacagaagaaattccgatgcctgtaatgcggaccaggcatctcagttcaaggtttgtgagctcctccagagcgcccaggtggctcaaaccactatcagttatcttgttgcagtaacaaaggttcagcagcttaattttcttgcagccgttggctaaggctgccagcccatcgtcggtgatagaactgcagcgatagaggtcaagttcaatgagc

SEQ ID NO: 9615 - DNA, 414 bp, Triticum aestivum
  Clone ID: uC-tsrow189075e12b2
tgttcgtgccgcctcgtcatctgccgtagctgccatgagctttagccccggatgttcgccctcctctccaatctcttacggaagcccgccgtcccctccgggattctgttaccggcggcacccgacgaccaccggaatagcagctcaggtggcgtcgaccctcaccacgtcctgcgatggctcgacgaccagcctcccaagtctgtcatctacgtcgcgctggggaccgaggcgccactgacgctagagaacatccatgaactcgcgctcgggctggagctcgccgaggtgcgattcctctggctgctaggcaagcctgccggaagcaacaaagtcgccgggccattgccggccgggttcgaggagcggacgcgggcgcgcggtgtcgtctgcacagggtgggtgccacagatg

SEQ ID NO: 9616 - DNA, 287 bp, Triticum aestivum
  Clone ID: uC-tsrow189075f04b2
gtggtattccccattccccatctccctccctgtcgatggccgtcgccgccgccgctgcttccatggcccgcaggctggtctcccccaccacctcctcgccgtgcaccgccatacgcctcctcatctcccgccgcatggcctccgtccggtccatcctgagcgccccggccgcggtggcgagggagatgctcagcccggcggccggggcctgctcgtccttcttccttctccgcggcgccgggggcgccaggggaatggcgcggcggccggggggcgacgggtactcc

SEQ ID NO: 9617 - DNA, 402 bp, Triticum aestivum
  Clone ID: uC-tsrow189075f05b2
ttgatactcttatggtactggcaagatccccgatagggatatcctcaagattgtgaaggagaactttgacttcaggcctgggatgatcggcatcaaccttgacttgaagaagggtggcaacaggttcatcaagacggctgcttatggccactttggccgtgaggatgctgacttcacctgggaggttgtgaagcccctcaagtttgacaaggcctctgcttgagaggtgggtatgaaggagtctatcattcctgctgctgccgctggtggttgtatcttggataattgaattccttctctttagaaggaagcagggtttcaacatcgccgtggacacactgaattggcgtcagtgattggtattttggtatggcatacacaattatgtgctgagttaatact

SEQ ID NO: 9618 - DNA, 460 bp, Triticum aestivum
  Clone ID: uC-tsrow189075f06b2
tgctcaccgataggtgtgccctggacaacacaaggctcgccattgctgcgatcggcaagctcatgtttgcgcagttctcggagttggtgaacgacttctacaacaacggtctaccttccaacctttccggcgggcgcaacccgagtttggactatggtttcaagggtgctgagattgccatggcctcatattgctccgagctccagttcctaggcaacccagtgaccaaccatgtccaaagcgccgagcaacacaaccaagatgtcaactctctcggtctcatctcctcaaggaagaccgccgaggccattgacatactcaaactcatgtcctctacattcatggtcgccttgtgtcaggccattgacctccgtcacctcgaggagaatatcaaggatgccgtcaagagctgtgtgaagatggcagccaggaagacactgagcacaaacaacaatggaca

SEQ ID NO: 9619 - DNA, 420 bp, Triticum aestivum
  Clone ID: uC-tsrow189075f08b2
tctttgccacgcgtccgggcaggctagccgtgctgcctcccatctcttctcttctcttgtcttctcttctctcccccaaggaggtcaaagacacagcgcatctgcatccggcctcctccgcgcgcgcgaattctggagggagaggggcggtaatggggagggctccgtgctgcgagaagatgggcctcaagaggggcccctggacgccggaggaggacaagatcctggtcgcccacatccacagccacggccacggcaactggcgcgcgctgcccaagcaagccggcctgctgcggtgcggcaagagctgccggctccggtggatcaactacctgcggccggacatcaagcgcggcaacttcaccgacgaggaggagcagtcaatcatccagctgcaccagctgctcggcaacagatggt

SEQ ID NO: 9620 - DNA, 225 bp, Triticum aestivum
  Clone ID: uC-tsrow189075f09b2
gtccacgcgtccgcccacgcgtgcgggcgcgcgtcctttccacgcgtccgcaattgcgcgcatcgactatgctcccttgggtcaaaaccgaccacagacgcaccctggcgccattgagaccctcaccgtgctggaggggacactgtacgttggctttgtcacatccaaccagcccggcccaaacagaaacagggtcctctcgaaggtgctcaacaaaggtgatgt

SEQ ID NO: 9621 - DNA, 485 bp, Triticum aestivum
  Clone ID: uC-tsrow189075f10b2
tttctttccacgcgtccgcccacgcgtccggagagtcttcacacgcgcgacgtgagtggaacgtgccacgcccacgcggtcgtcggctggagacgccccactgattacgcgagccccgacccaccccaccagcacagcgccctcgccgcccgccgctcacctgccccgcgcccctccggccgtataaatacaaggcgcccgtggcggagatgggtaccgctttttcctcctcctcttccaccccagagtccagagctatggcgctcgccaaggccaaggagatcgtcgcctccgcttccgtcgtcgtcttcagcaagtcttactgccctttctgtgttcaagtgaagaagttgctcacgcagcttggagcaagtttcaaggccgttgagatggacactgaaagcgatggaactgagattcagtcagctcttgctgaatggactgggcagaggactgttcccaatgtcttcatcaatggaaaacac

SEQ ID NO: 9622 - DNA, 306 bp, Triticum aestivum
  Clone ID: uC-tsrow189075f11b2
tctaattcccacgcgtccgggagaaggatttttgagctgtttactgagcaaattgggcgattcatggcagcggatagcaagatcatgattcctggttacatgtactttcctaccaaaaataaccgatggatgcatcaaattaacaacgagattgagtccatcttgcggggcataattgcaaaaaggatgcaagctatgcaagaaggggaaagcacaaaagatgactaactcggcttattactcgagtcaaacatgtcagacacggatgaaaactgtcaatccaccctaggaatgtcagcacatgaa

SEQ ID NO: 9623 - DNA, 224 bp, Triticum aestivum
  Clone ID: uC-tsrow189075f12b2
tgcgtacggtccgaccagagcttcctcgacgacgaccagatcgtggcggggtgggtgctcacctgcgccgggtaccccacctcggacctcgtcatcgagacccacaaggaggaggagctcaccgcttgaattcactgatttgtttagttcgacccgtttccaccgtgcgcgtgtaccatgcacgacgtacgaactgtatcaggatattgaggagtagtacatgc

SEQ ID NO: 9624 - DNA, 260 bp, Triticum aestivum
  Clone ID: uC-tsrow189075g02b2
cgccgatccagcccccgccgcgatggaactcgccctcgtcgacggcgagaagttctcgccctcctgctccacgcttgtcatgcccgcgctttcgatcggcaacgtggggcagctcgccgtggacctgctgataccttcggcgaaggcgaggcgcgtggcgtacctcgacgagccctccgtgctgccctgcatcggcaacgacgccttcggaccggacgccgggggcgacctcgcgctcgcgctcgaagaatacgaatcac

SEQ ID NO: 9625 - DNA, 313 bp, Triticum aestivum
  Clone ID: uC-tsrow189075g04b2
gcgtccatcgcgtccggcgattccaaccgctccacggcctctgatcgcgagcagaccagccaagtccgcaggaagaggggaaagatcgcccagggcatcaaagaacacgtgactctggggccaaagctgtcggagacggtcaaggggaagctcacgctgggcgccaggatcctgcaggccggcggcgtcgagaaggtgttccggcagtgggtctccgtggacaagaacgagcggctggtgagggcgtcgcaatgctacctgtccaccacggcgggtcccatcgacgggatgctcttcgtctccacggagcgcg

SEQ ID NO: 9626 - DNA, 448 bp, Triticum aestivum
  Clone ID: uC-tsrow189075g05b2
gtggtagccatgggggcgggggtctcgagctgttgcttcatcgcggcggcggaggctgctccgggtgctgcgggcctgggcgacctgccggagctctgcgccgcgcaggtgctgctgcggctcgacgcgccggagatctgccgcctggcgcgccttaaccacgccttccgcggcgccgtgggggccgacttcgtgtgggaggccaagctgccggagaactaccgtcacctcatcgggtacgtcgagggcgggggcgaggagggcaggcgccggctgccgcgggccgggaccaaggagatctacgccaggctctccaggcccgtctttttcgacgacggcaccaaggaattttggctagagaagagcaaaggttgggtttgtatggcgctatccttcaaagctctggtcataactggcatcgatgacaggagatattggacacacatgc

SEQ ID NO: 9627 - DNA, 161 bp, Triticum aestivum
  Clone ID: uC-tsrow189075g08b2
gcccacgcgtccggttcgcatctcctcatccacgcaccagacaacgcccgtcgatggcgctctaggctctcccgccgccaccctgtcgccggccccgtcgctctcccaccctgtcgccggccgcgtcgctcccccgccccgtcgccggccctccccggccc

SEQ ID NO: 9628 - DNA, 348 bp, Triticum aestivum
  Clone ID: uC-tsrow189075g09b2
ttatcggacagagagaggtagagagagagatagggggagggtgggagaggagaccctgaccaatgccaagaacaagaagagatcagtgagaaggccaggcgaaaatccccaccgggcgagaagagacgagctccggcctgctccgagaacaagaacaagaaggaatcccggagcacgagggaagaataaagcgggcggaggagaccggaaaggccgaggagaaaaaagctcttgattgatggagaaggggatggatccggagctgctggacaacatcatcgccaggctgctggaggtgaagagcctcaagcccgggaagaacgcgcagctgtccgagtcggagatcaa

SEQ ID NO: 9629 - DNA, 368 bp, Triticum aestivum
  Clone ID: uC-tsrow189075g10b2
ttctggtctcgtctgcgacgtccgcgccagagaactccgccgcggcactcgacgtcatctcctcgctccggctcccggagcggtgcctggcgcgcgccgtcgacagggatggcgcggcgctggtcggcgcgctcgtctccaccctgcagggacactccggccccgacgcggatgcggcgtcccgggcacgcgcagccgtgctcctggcggacgtgatggcgtgcatgtcgccgagcagggcggcgtcgctcccggagcaggcgttcgtcgaggctgtgcggctgctccgcggcgacgacggcatgggcgcctcgacctcgatggcgaccaaagcggcgctgcgggtgcttgcaggcgcgaccgcccac

SEQ ID NO: 9630 - DNA, 371 bp, Triticum aestivum
  Clone ID: uC-tsrow189075g11b2
tggtgtccatccccgccgccgcctccgctcggttccttcttcttcctccgagccatgggcaaggagaagactcacatcaacatcgtggtcattggccatgtcgactctggcaagtcgaccaccactggccatctgatctacaagcttggaggtattgacaagcgtgtgatcgagaggtttgagaaggaagccgctgagatgaacaagaggtctttcaagtacgcctgggtgcttgacaagctgaaggccgagcgtgagaggggtatcaccattgatattgccctgtggaagttcgagaccaccaagtactactgcaccgtcattgacgcccctggtcaccgtgacttcatcaagaacatgattactggtac

SEQ ID NO: 9631 - DNA, 277 bp, Triticum aestivum
  Clone ID: uC-tsrow189075g12b2
ggtgatctgcactagtcgctgcaagaaccaccaccacaagtgagtgaacgtcggaccaaggaaaggcagggagagatggcaatgaggccgctcgtcgtcctggctctggccgtggcgctggccggggtggcgctgcgagggggcgcctcggagggggccggcgagtgcgggaggtcctcccccgaccggatggccctgcgcatggccccgtgcatcttggcggcggacgagccggactcggcgccctccagcagctgctgctcggcggtgcacaccc

SEQ ID NO: 9632 - DNA, 373 bp, Triticum aestivum
  Clone ID: uC-tsrow189075h02b2
gtgggagaaacccaacgacgacgagggagagatggaaaggatctcgtgcatctcggccatggcgaaccagggatccaagaagattgtggagaggaacaggaagcgcatggatctcctctgcgcataatcctcgtgtccaacgttatttacatagtagtgaggatggctgtaatgtactcttctttcacctggaagcattggatcggcctcgtggtgacatctgctgcatactctctttcatacaagcaactctctagtatgacaaagcccgaatgttctgacgcggacaatcgtgaacttctgagttcgggatatgacttggccactggtgggcattctgaatatatagaggatgtgatatacatcacagcat

SEQ ID NO: 9633 - DNA, 306 bp, Triticum aestivum
  Clone ID: uC-tsrow189075h08b2
tcgtcgcgctccgcctcccgttcgcctgcacgccgcggtgctctcgtctgcgtccccgcctccgcccccggcgcccgtcaccatgatcatctccaagaagaaccgccgcgagatctgcaagtacctcttccaggagggagtcttgtacgccaagaaggactacaacctggccaagcacccccaggtcgatgcctcgaacctcgaggtcatcaagctcatgcagagcttcaagtccaaggagtacgtcagggagaccttctcgtggcagcactactactggtacctgaccaacgacggcattgagtt

SEQ ID NO: 9634 - DNA, 393 bp, Triticum aestivum
  Clone ID: uC-tsrow189075h09b2
gtcggatccggatgatgctggtcaatattttgttcatgaaaatgtgaagacagaaccagacccagatgataatgatgccatgcctgttgatgtaacaattgtgacatcaggaccagcaggttttgtagcatctacagagcagaataccataggttattctgagcctgttcttgatgatgttgccaagaaaagctctgttggttacctagaacctgatcctgatgattccgcagatgttgacatgcttaacaaggacatcaatggtgagcatgataatgaacctgatcctgatgacggcactagtgaatttgtcctagaatctggaaacaagatggaagtggagatggagccgagaactgactccacagttctgaaatctgaacctgatcctga

SEQ ID NO: 9635 - DNA, 420 bp, Triticum aestivum
  Clone ID: uC-tsrow189077a01b1
gtctctgcgtcaaccgaacgaccccgtccgcccgccgtatatcacaaggagaaagggatcgaccccgccgccgccgacgccgagagacgatgagctatcagcaggtccctccggaggaggcctacccgccgccagggtattcgccggtgtacccgccgccggcgcccggcgcgcagcagggcccgtactacccgccgccgcagcagcagccgccgccgccgccggggtaccagggatacttcagccagggccaaccgcagtagccgtcgccctactactacccgtcgtcgccgacgcacggtggccatcaccaccacggccaccaccaccatgaccaccacgccgaggaccaccacgccgaggaccaccaccaccaccatggccaccatcaccaccaccaccacaacgatgatgactgct

SEQ ID NO: 9636 - DNA, 419 bp, Triticum aestivum
  Clone ID: uC-tsrow189077a02b1
ccctctcgtccgcttttttttttttttttgcatgggaaatattgaccttcatttcacaaatattgtaatctgggggtggccagtatagataccaacaaattttacatacaagatacaaaaatgattgaccaccattacagaggaggagaatgcaatgagggagagggagaaaaatggaattatacctatgtgacacattggccgcgattatgtacgccgcagcataatccctttattaaacatatggttttgctacaaaattaactttgccgccttcatcaccgtgtcttttggcagtaaaaccttggcctggaaagcttagccaccaagcctgtcgtcctctgcagcatgcacttgcccgatcagtctaatggcaccttgcgacccatgatgattcatgacgagttagctgacccatt

SEQ ID NO: 9637 - DNA, 344 bp, Triticum aestivum
  Clone ID: uC-tsrow189077a04b1
cttattgtccgctgggcatccaagtctgtctatcttaggggcaagaagtcgtggttctcatgttcctgaatttactgtacccactgatgcccatggtggattgcccatttattagtcttatggtcccagctattcctacttataacacccccaaatgttcaggagagctattggtgcgtgttgtatgccctggtgacaagattgggttagttattggtaaaggtgggatgaccataaagaatataaggaaagaaagtggtgcaagcgtagatgttgatgacgcaaagaatgataaggaggaaagcataatcaccattttgtcaactgaggccaccaatgatgtt

SEQ ID NO: 9638 - DNA, 245 bp, Triticum aestivum
  Clone ID: uC-tsrow189077a05b1
ctataaaccttcatcaagggcgcgctttaactgcctgggcggaccagttatagccttctccatcatctgttgctacctgcatcaaaccatctgccacatgtcgcacctgagcatcctgaccttcaagttcaacctatcgaagctccggttcaagcccttccgtacggccggacggctgctgtccgctcagggaccggcagcagtccgacctgatgatgtacaagcctgacgaggaggagatggcc

SEQ ID NO: 9639 - DNA, 466 bp, Triticum aestivum
  Clone ID: uC-tsrow189077a06b1
cgtctttcccgttctcctctccccctgtcgccggcatagcatcagcagctccagctcgagcaagaaagaactagtttgatctgtgaaaatgttggccatcttccagaagcaggtggcgcacgcgccgcaggagctcaacagcccgcgcggcagcaccgccaagcccaagaaccccgacgagatcctccgcgacttccacgccgcccacccctccgacgccttctccacctccttcggcggcggcgccgccctcgcctgcgtcgccgcgcagccccgcaacctcgccgccggcgggtaccagaggtaacgccaccatctctcatgacccaaatcgctcccagcaaccgcaacgatgtccggacgaataagaagaaccgatctctctgtgtgcgcaggatgttctgcgggctggacgacatctactgcgtcttcatggggacgctggacaacctgagcgcgctgatgc

SEQ ID NO: 9640 - DNA, 336 bp, Triticum aestivum
  Clone ID: uC-tsrow189077a08b1
gttatgagtacttccagagggagccaaggaggagctctgttgtgaatgggcaacgggttccctgctgcgatagttcacattgggggagtaatgaactggaaggggagaatgatcaatgctgttgtcaagagccaatcaggaggtgattccagttccaatggatcaaatgatcgtttccttacaggcctttatgatgatctggctcaagactgccttgcctggacaagcagagcagactacccttcactctgttgtctgaacaagaaattcaatacgttggttaacggtggatatttgcacaagctgccgtggaaatatggtattgctgagcattgg

SEQ ID NO: 9641 - DNA, 328 bp, Triticum aestivum
  Clone ID: uC-tsrow189077a09b1
ctctcgcgtgcggtgcctatggctggcgccgggtgcgattctctctctgcgtgttgctcccgtggcggccacttcaaaccgtaggcgccgtcggacaggaggggcatttaccagacatgttttgggcgcatgccaaggaagaccagcatcaacaccaagcactatgaggtgcttggtgtattcaagacagcaaccacggatgagttgaagaaagcttaccggaaaggggttataaaaaaccatgctgataagggcggacaccctgagaagttgaaagaattggcacaagcttatgatgatctcaatgaccctgagaagagggagattt

SEQ ID NO: 9642 - DNA, 447 bp, Triticum aestivum
  Clone ID: uC-tsrow189077a11b1
tgttcgcgtggggcgcgcctggctcgtccgggaccgcctcgacggccgcttcctcctcgaccgcgccgcgcccgccggctccacggccttcaccgaggtcgccgtctgcgacccgcttttcccggcgctgcctcctgctcccgccaatccccgacgccctcgccgtctccgtcgacaacccctacctccagcgcggcggcgacgacggggggctccagtcgcgcagcaacgagatcttcctggcttctcgcggcaacgacgaccgcggcgaggagctgccgttcgccgtcatctggatggcgtgctgccgagggaagctggtcgcgttctccttctgctctggatctcgggaatggagcgcgctttcgccgccggtgcaccacgcgctcagcatgcggagggtcatgggtgtccgactggggcagcgcaaccatgcccacgggtgct

SEQ ID NO: 9643 - DNA, 340 bp, Triticum aestivum
  Clone ID: uC-tsrow189077a12b1
tttccagggtcgcaagaaagagtgaatgcttcaatggtgaagctcgcattcgggagctgtggtgactccttcagcgccacgtccatcagggcgtatgcggcggatttaatcgccaccctcctctttgtgttcgccggcgttgggtccgccattgcctatgggaaaatcaccgatgatggcgctctcgacccagttggccttgtggcgatcgtgatcgcccacgccttcgccctcttcgttggtgtcgcgatcgccgccaacattttcggcggccacctcaaccccgttgtgaccttcggtcttgccgtcggcggccacattaccatcctcaccgggatct

SEQ ID NO: 9644 - DNA, 338 bp, Triticum aestivum
  Clone ID: uC-tsrow189077b01b1
ctatattggccctctcaaatccgccgtcgctagcagtaaactatttcctccttcttcttcttcttgtttccttttcctgcgtcaacaagtgataaataagaaccgtagcagcagcagcagcagtagccaggtagtagtgattccggtgcaaagatgtcgtcgtcgtcgctgtcgccgggaggtgggaggctgtcgggctcggacggcgactcgggggcgacgttctcggccggggacaaccggcgggagaagaggcggctgtcgaaccgggagtcggcgcggcggtcgcggctgcggaagcagcagcacctggacgagctggtgcaggaggtggcgcg

SEQ ID NO: 9645 - DNA, 443 bp, Triticum aestivum
  Clone ID: uC-tsrow189077b02b1
gtttttagtgctgtgacccaaagcattggaccttcaattcataagctgaaaagatttgataatttggatggtagttactttggctttccacctgatccattttccgcatcacgatccagacaacaggttgcaatttcgagcgagttggagcaaaggaactgcctgatgtttgaacattcagcagcacggcagtctcatgggtatcctcagtccacaaacggcaagggcacaaagaactttaatttgaatgaagcactgtcagatggtctggaagagcttgtagaacaggatgggagatctgttggtagtttgcagcatagtaaaggtgaaggatcagtatttgggatctcttggctaaaaaataaagctacttgtgctgacccaacaaggctggaaaagcaaagaaagatgcttggccattccaacgggactgcagcagacac

SEQ ID NO: 9646 - DNA, 422 bp, Triticum aestivum
  Clone ID: uC-tsrow189077b03b1
cttttcgccttcagtggtgccgaggacgtggccctcatcgaatacgcgaaactgactggacgccccttcagggtgttcagccttgacactgggcgactgaacccagagacatacgaactcttcgacaaggtggagaagcactatggtatccacatcgagtacatgttccctgaggccagcgaggtgcaagaccttgtgaggagcaagggcctcttctctttctacgaggacggacaccaggagtgctgcagggtgaggaagggttcggcccttgaggagggccctcaagggcctcaaggcctggatcaccgggcagaggaaggatcagtcccctggcaccagagccagcatccctgttgttcaagttgatccgtcttttgaagggctggatggtggagccggtagcttgatcaagtggaacc

SEQ ID NO: 9647 - DNA, 294 bp, Triticum aestivum
  Clone ID: uC-tsrow189077b04b1
attcttgataccaaagctcatcttcttctccttgaaatctttttgggttcacagatttggaggatgtcttgcaactgtggatccggttgcagctgcggctcagactgcaagtgccggaagatgtaccctgatctgacggagcagggcagcgccgccgcccaggtcgccgccgtggtcgtcctcggcgtggcgcctgagaacaaggcggggcagttcgaggtggccgccgggcagtccggcgagggctgcagctgcggcgacaactgcaagtgcaacccctgcaactgttaagct

SEQ ID NO: 9648 - DNA, 394 bp, Triticum aestivum
  Clone ID: uC-tsrow189077b05b1
ccagttctcctatacccctgtcgccggcatagcagcagcagctccagctcgagcaagaaagaactagtttgatctgtgaaaatgttggccatcttccagaagcaggtggcgcacgcgccgcaggagctcaacagtccgcgcggcagcaccgccaagcccaagaaccccgacgagatcctccgcgacttccacgccgcccacccctccgacgccttctccacctccttcggcggcggcgccgccctcgcctgcgtcgccgcgcagccccgcaacctcgccgccggcgggtaccagaggtaacgccaccatctctcatgacccaaatcgctcccagcaaccgcaacgatgtccggacgaataagaagaaccgatctctctgtgtgcgcaggatgtt

SEQ ID NO: 9649 - DNA, 311 bp, Triticum aestivum
  Clone ID: uC-tsrow189077b06b1
tgttatttcgactcgatcgagaaagttcttcgtctccctctcgcggaatacacaaagcaccggttgatcccaagcggaagagcagtgatggcgcagtccggcaacagcgacgccgtcccgatcagcacccagcccgcggtggaggaggtgacggtggggaggacgcccgaggaggaggcggccaggctgaggtacctcgagttcgtgcagcaggcggcggcgcaggccgtcgtgcttgccgtcgcggcctacgcgtacgccaagcagggcgccggcccgctccgccccggcgttgaccacgtcgaggggac

SEQ ID NO: 9650 - DNA, 392 bp, Triticum aestivum
  Clone ID: uC-tsrow189077b07b1
ttctacctctcatcctcccacttccttttctgggccattctaagccaccatgccgggctccatcgccttcggtcgcttcgatgactccttcagcttggcctctttcagggcctacatcgccgagttcatctccaccctcatcttcgtcttcgccggcgtcggctctgtcatcgcctacaccaaggtgagcggcggcgcgccgcttgacccatccgggctgatcgccgtggcgatttgccacgggtttgggctgttcgtcgcggtcgccatcggcgccaacatctccggcggccatgtgaaccctgccgtcaccttcggcctcgccctcggcggccagatcaccatcctcaccggcatcttctactgggttgcccagctcctcggcgccatcg

SEQ ID NO: 9651 - DNA, 457 bp, Triticum aestivum
  Clone ID: uC-tsrow189077b09b1
ttatccaatcccctaaacccggccccaaaccgtagcgccgccgccatgctgcgccgactcgcctccgccgccgccccgcgggccttcttctcgacctccccggctgcgggccacgcccccgcgccgcgagtacgggctggtccccatggtgatcgagcacacctcccgcggggagcgcgcctacgacatcttctcgcgtctcctcaaggagcgcatcgtctgcatccacgggcccatcgccgacgacacggcctcgctcgtcgtcgcgcagctgcttttactcgagtccgagaaccccgccaagccgatccacctctacatcaactcccccggcggggtcgtcaccgcgggcctcgcgatctacgacacgatgcagtacattcgctccccggtcaccacgctctgcatcggccaggccgcctccatgggctcgctgctgatcgccgcgggcgcgccc

SEQ ID NO: 9652 - DNA, 425 bp, Triticum aestivum
  Clone ID: uC-tsrow189077b10b1
tttttgcgaaaggcttgatcttgaccggccggcgtccatggcggcggggcggcagcagcgggtggtggtgatgcggcacggggaccggctggaccacgcggagcccatgtggccggccaacaagccgcggccgtgggacccgccgctgaccgacgccggcgtcctccgggcctggaccgtcggcaagcgcatccgggcgcaggccgccgccgacggctacgcgctccaccgcgtcctcgtctcccccttccaccgctgcctccagaccgccgtccaggccgtcgccgcgctctgcgccgtccccgacgacgccgcgctcgccgccgtcctcgacttcagcgccaatgtgcccctcgacacctcccgcgtcaaggtgtcgatcgagtatggactgtctgagatgatgaatgttgaagcgatgggcg

SEQ ID NO: 9653 - DNA, 412 bp, Triticum aestivum
  Clone ID: uC-tsrow189077b12b1
ttgtttacggcaggctcacgccgctcgccatcgagctgagcgagcccgtcatcctgggcggcctcaccaccgccaagagcaaggtgtacacgccggtgccgagcggcagcgtcgaaggctgggtgtgggagttcgccaaggcctacgtcgccgtcaacgactccggctggcaccagctcgtcagccactggctgaacacccacgcggtgatggagccgtttgtgatctcgacgaaccggcacctcagcgtgacgcacccggtgcacaagctgttgagcccgcactaccgcgacaccatgaccatcaacgcgctggcgcggcagacgctcatcaacgccggcggcatcttcgagatgacggtgttcccgggcaagtttgcgctggggatgtcgtcggtggtgtacaaggactg

SEQ ID NO: 9654 - DNA, 379 bp, Triticum aestivum
  Clone ID: uC-tsrow189077c01b1
cgtattcgtgggctatagcttactagcagcagggctctcttcttgctcttcgctatctagctccactttgctcgttgtcctctccctcttggatcgatccggccttcggcggccatgaattgcgccggggtcgctcgatgggttgcctgcaggcgagccggataccggcgtcgtcgaccagccacggaggaggagctgcctgtagcgtagctgagctatagtgctcggtcgatctgctgcttcttgggggcgaggaagaagaataaccgaggcttactctcgacgacagcacaaggcggagccagataatttccggtgacgcacaccatggatccccagacatttgtgaggctctcagtcgggcagcttggcctgaggc

SEQ ID NO: 9655 - DNA, 342 bp, Triticum aestivum
  Clone ID: uC-tsrow189077c02b1
agtatacaggacaagccaattgctttgctcgagaagtgtttaagcaacgatgaagagtagcacgctcgtggcgatcctgattctccaggccgtcctggtcatgggaatcctctcacaggcgaacgccgagttgccaaaatgctgcgacaactgcaggttcttctcgggggccgtggtctgcgacgacgccggccctaagtgccgcgacggctgcgtgaactgccgtgtcgtggagacgagccccaagatgacgtttcggtgcgccgatgcgcgcggcgacgacggcacgccctgcccgccctgcaagaagtactgatcgcgcatgctcggaacataagatgt

SEQ ID NO: 9656 - DNA, 494 bp, Triticum aestivum
  Clone ID: uC-tsrow189077c05b1
cgtccggtctactacaatgaggcctcctgtggtcgctttgtgccccgtgctgtccttatggatcttgagccgggcaccatggacagtgttcgtactggaccgtacgggcagatcttccgccctgacaactttgtgtttgggcagtctggtgctggtaacaactgggccaagggtcactacactgagggtgcagagcttattgattctgttcttgatgttgtcaggaaggaggctgagaactgtgactgccttcaaggtttccaagtatgccactctcttggtggtggtactggatcaggcatggggacccttttgatatcaaagatcagggaggagtaccctgaccgcatgatgcttacgttctctgttttcccctcacccaaagtatctgataccgtggttgagccttacaatgccactcttttggtccatcagttggttgagaatgcagatgagtgcatggttcttgacaaccaggccctttatgacatctg

SEQ ID NO: 9657 - DNA, 410 bp, Triticum aestivum
  Clone ID: uC-tsrow189077c06b1
cctatgcgtccgcgcgtcgctcccgtgcgagcgacacgggcggaacccagaaacctagcgcccccaccgcgagatccacccctcctctcccgccgccgctggaggaagctgcagggcaaagccgttgcagccgacggcggcgggggggggccttgctcgcgtcgtgggatggccctggtcacggccgtgcctccctcggtgaccgcggcggcggatttggcaaggcgctcggattcgactcgtccggctccggtggcctgcctcatcgtcgacatgaaggtgctgctgctcgagcgcggcccatggtctgctaggtggtggaggggcgctcgggggtggcgctggcgcccagatccacctcgtccttctcaggtgcgtcgggggctggcctgctcctttccttcggcgct

SEQ ID NO: 9658 - DNA, 423 bp, Triticum aestivum
  Clone ID: uC-tsrow189077c07b1
ttttcgcgtccgaaggtggcagaaaaggaggcagaaactcagaagaagatcgcactatctgaagcagaaaagaatgcactagtgagcaagatcctcatgcagcagatgcttacggagaaggacagttccaaaaggcagcagcagattgataatgaaatgtttcttgcccgagagagagcccttgcagatgcaaactattacaggattacgaaggaagcagaggctaacaaactaaaacttacacctgagtatcttgagctgaggttcattgaatcaattgccaataacacaaagattttctttggtgaaaagattccgaacatgatcatggatcaaaggttgattcgaaatcaccttgattctgctccgagcaaggaccagttagaaatatagtatcatctcttgtaaatttgaaggaacgat

SEQ ID NO: 9659 - DNA, 459 bp, Triticum aestivum
  Clone ID: uC-tsrow189077c09b1
ctataaatcaatttgtcttcttcagctctggaggcttggtgtcattgtctatgattggctggacattccttggctgaagaattactataatttcggttttgatcactttgaaatgtcttggaggaaagttggtttttctggtttagttgatcttctgctagggaatactgggccgttttgctcaggagactggattctccctgacctcacaattcaaggatctctaaaaattaactctaccctcaagacctttcccaatacattctacttcagttacgctacaaagagaactcgaaagctatttggaattacagtaccatcaagcgtccttggagttcattcaatgctctttatcagagttctccagatgtgtatgtggcggtaccctcaaaacgcacctctaccttacaaaggatacagggatgaagattgggaagataatgatggggctttgaacac

SEQ ID NO: 9660 - DNA, 441 bp, Triticum aestivum
  Clone ID: uC-tsrow189077c10b1
tttttcaccctcccccatccgccgccgcctccacctctacaggggaaggaagggaagatgtcgcaccgtaagttcgagcacccgaggcacggatccctcggtttcctccccaggaagcggtgctcgcgccaccgcggaaaggtgaaggccttccccagagatgaccaatccaagaaatgccacctcactgccttccttggctacaaatctgggatgactcacattgtgcgtgaggtcgagaagcctggttccaagctgcacaagaaggagacatgtgaggctgtcaccattgttgagacacccccgattgttattgttggacttgttgcctatgtgaagactcctcgtggccttcgtactctcaacttagtctgggcacagcatctcagcgaagatgtcaggaggaggttctacaagaactggtgcaagagcaagaagaag

SEQ ID NO: 9661 - DNA, 317 bp, Triticum aestivum
  Clone ID: uC-tsrow189077c11b1
tttgtcgcgtgggcgagctagatcaaacacaaatcgccgtgcgatcatctctccgtgtgtgctagcttctaattctctaatcgatcatgggtggaggccacgacatgcacggcggccacaatcggcggtgtgaagggcttcgtgtccggcctcgttaacggcgggaaaggccacggctacggatcgtcatacggtcaggggcacggctacggcggtggccacgtgcagggctacggcggccatggccagagctacgagcacgggtacggcgggcatgcgcagcacgggcacggcggctatgagcacgggtacggcgg

SEQ ID NO: 9662 - DNA, 91 bp, Triticum aestivum
  Clone ID: uC-tsrow189077d02b1
gatcggggacaccgccacatgtgccatcaagcaggttgcatttggacgttttggtgttacaccaacatttctagttaatgctgaacaaatt

SEQ ID NO: 9663 - DNA, 125 bp, Triticum aestivum
  unsure (1)..(125): unsure at all n locations
  Clone ID: uC-tsrow189077d04b1
cttatttcgtccgcggacgcgtggggcccatactaaccgaagcactgtatccaattcatgacacgtttctacgttatcctgtagtatgttttatgactaaaaaaaaaaaaaaaaaattnaattat

SEQ ID NO: 9664 - DNA, 446 bp, Triticum aestivum
  unsure (1)..(446): unsure at all n locations
  Clone ID: uC-tsrow189077d05b1
tcgtgttcgcgtgggccggctccgacttcgaccagaggaagcaaggcaggcaggcaggggcggggccgatcgatcctaccccgaacctcacacacgcagcagaaacttccagaagccggtccattcccatccttttttgtggtcgaccagccggccagattctcctgatccatttatggagggagatgggccaggcctttcgcaagctcttcgnatgccttctttggcaacaaggagatgcgggtggtgatgcttgggttggatgcagccggtaaaaccaccatactctacaagctacacattggcgaagtactctccaccgtccccaccattggtttcaatgttgagaaggttcagtacaagaatgtagtgttcactgtgtgggatgtgggcggccagtagaaattgaggcccttgtggaggcactactttcacaacacggatgc

SEQ ID NO: 9665 - DNA, 287 bp, Triticum aestivum
  Clone ID: uC-tsrow189077d11b1
tgtattcatttctcaaggcggccaggcacctggagtgtgctatgcaacacgttctgtccagttccagattgtcgcctggatagagtaactgttgatgaccgcctgcattttcttgttggtaaggcctttccatgcaagctcttgcttaggcctcctgcaacgactcaatccagcacaacccttttgcagctagccaggcctaggcaggcagcattcatcatcgacagacaggtcaccttgtgcgcttgcatcaacgtgcagactcgcacgttgatcaaaggatggtt

SEQ ID NO: 9666 - DNA, 208 bp, Triticum aestivum
  Clone ID: uC-tsrow189077d12b1
taacatctagcttgcaaacaactgaagaaaaggccatcttgtgttgcatgtcgtacatagtgtagataagtgcaacaattaataaaagatcgtgctcgtctaatccttggattgatgcatcttgttaaggagtacaatcgcgttatgtgttccatatttgtccctcaaaggtcaaggggtgaatcaaattgtgttattagaaagctat

SEQ ID NO: 9667 - DNA, 317 bp, Triticum aestivum
  Clone ID: uC-tsrow189077e01b1
gctcatctccggcgcgcacatgaaccccgccgggacgctctccttcgcctgcttccggcatttcccctggattcaggtgccgttctactgggcggcgcagtttaccggggcgatgtgcgcggcgttcgtgctgtgggcggtgctgcacccgatcacggtgctggggacgacgacccccacggggccgcactggcacgccctcgtcatcgagatcatcgtcaccttcaacatgatgttcatcacctgcgccgtcgccacggactcgagggcggtgggtgagttggcggggttagcaattggttccgtggtttgcatta

SEQ ID NO: 9668 - DNA, 417 bp, Triticum aestivum
  Clone ID: uC-tsrow189077e03b1
cctcgttaaatcaaaactggtgtatagattgttggtttgtcactatgtgcacagggttatgattgggtaattgaaatgttattcacattgtcaattgactaatatgtgctacttggtacccttgctacagagaaaccagcgacaatggtgatccctccaccagacagggcagctagaatcgtcggttttctcaagcccaaccttttgaggatggatttctcgaacaagtttgtgaccgcccaggtgatccacaccccaacaacaaccgtcccgtgttctgtgagctcacgggagaagctgctgagatcgcacatgtagtcgaccggcgacgtctctgccgtcgcaaagattggaaagttgttgggcgagcgcctgctgctcaagtagatacctgccgtgtccattcacatgaagaga

SEQ ID NO: 9669 - DNA, 421 bp, Triticum aestivum
  Clone ID: uC-tsrow189077e04b1
cctctgtataatcaaaactggtgtatagattgttggtttgtctctatgtgcacagggttatgattgggtaatcgaaatgttattcacattgtcaattgactaatatgtgctacttgttacctttgctacagagaaaccagcgacaatggtgatccctccaccagacagggcagctagaatcgtcggttttctcaagcccaaccttttgaggatggatttctcgaacaagtttgtgaccgcccaggtgatccacaccccaacaacaaccgtcccgtgttctgtgagctcacgggagaagctgctgagatcgcacatgtagtcgaccggcgacgtctctgccgtcgcaaagattggaaagttgttgggcgagcgcctgctgctcaagtagatacctgccgtgtccatccacatgaagagagag

SEQ ID NO: 9670 - DNA, 417 bp, Triticum aestivum
  Clone ID: uC-tsrow189077e06b1
aatctgcgaggatcgatggggcagaggttcaggttcttctgctgcggctgcggggccaatgcggccgacggcgacatggaggtggacgacgagtcggagtgcggcgggggcaaaggggggcgaggaggccggggcgcggcagctgtcgtgggcgcaggtggagaggatgacgggcgggttcacctccgccgtggtcggcgagggcggcttcagcaccgtctacctcgcgcgcctctccggcgcgctcgccgccgtcaaggtccaccgcagcagcgagcgcatccaccgcgtgtttcgtcaggagctcgagacgctcctccgcattcgccacccgcacatcgtccgcctcctcggtttctgcgagcagcaagatgagggcgtgctggtgctggagttcgcggcgaacgggaacctgta

SEQ ID NO: 9671 - DNA, 374 bp, Triticum aestivum
  Clone ID: uC-tsrow189077e07b1
tgtaacaggctattctccataccctggaaatagtaaaccatctgatactcgagcttggaccatacattgaggaactcaagaaaacacatggcgccatttctgaatttggaaaattcaaagtatactgactctaccaagacagcatttaaatcctccactcgtcttgagtgcatgatgcaagactatgcgaaaacactacctccaacggcaaaagttgggtttacggtgatggatgcttggcttgcatatgctcctgtaaagaacaattctgaagatgcatctaaagttccaaaaggcaatccttttcatagtgcaaccttaggagagatggcaatttacagggcaaacagcctcattttaagaaaggccggtgc

SEQ ID NO: 9672 - DNA, 468 bp, Triticum aestivum
  Clone ID: uC-tsrow189077e08b1
tttttacgcgtgggtaccactggtgagaccatttgctctttacgaccaatactgcatcgcacacattatgtgtgcacgcagacagctggatcgagcattggaaatatccaacacatgatcacaaagaactactattatcccattcctccgggaattgggcgcacaactcagagcgctcaaattggatatggtaaagccactgtagcggcttatggctacaattggaatgcaaataatccaatagactggatttccgacatgtttgtcggagtccgagggtctacggttttgcatgccaatgttgtgggacaaagcggtaacacagtccaggtgaattccttttctgctgcacgtgcttatgtcccactacccaatctttcgggaaactccaatacgatttccacttcggtttctgtcactgctggtctcattaatgacatcagtcgggacgcattatcgaatgcacca

SEQ ID NO: 9673 - DNA, 196 bp, Triticum aestivum
  Clone ID: uC-tsrow189077e10b1
tttttgtcatggcaaatgtttgctagcagttacgtagattagtgtcagcgtgcgtttgtctcctctcaatcaacacacatgcacattaaggacagtagatcctgctcacttcgtgggtagcacgtgtcctaccttcggttgtaagtaattctgtatagataggcacccgatcaatggaaaagttgtgttgaatcat

SEQ ID NO: 9674 - DNA, 259 bp, Triticum aestivum
  Clone ID: uC-tsrow189077f02b1
cctctcgtgcgattcttgttgctccggctgcgtgtctttcgttaaccagatatcaattatcaccggcgtgagacacgagcctgattgaacatgtccgcctcacgcgccctgctctcgagcccgcacggcggtgcgagccggaccttcacgagagcgccgacccgcctcgccgcgggctcgatcccgttcgcgcgctgcggcgctctccgcgcccggaccgcgatcctgtcgtggccggcggccactgtgccggtgacct

SEQ ID NO: 9675 - DNA, 364 bp, Triticum aestivum
  Clone ID: uC-tsrow189077f05b1
ctttcttgtgctttgggcgattccatccgaggcgagatgagtagaggagagcataggatgaggccacggaggagaagttcggtagggagatcgatggggctgtcgttcgggacgctgctcgggggtgctgttcgccaagaaggagatgcggatcctgatggtcggcctcgacgccgccgggaagaccaccatcctgtacaagctcaagctcggcgagatcgtcaccaccatccccaccatcgggttcaacgtggagacagtagagtataagaacatcagcttcactgtttgggatgttggtggccaggacaagataaggcctttgtggaggcactactttcagaacactcagggccttatcttt

SEQ ID NO: 9676 - DNA, 402 bp, Triticum aestivum
  Clone ID: uC-tsrow189077f06b1
tatattcccaggttaagtcaatctgaattcatcgggccctactggaagttcaccaaaagctttagtcaaccattttctgttggatcgaggttcaaaatgagatatgaaagtgaggatgctgctgaaagaaggtacacagggataattactggaactggtgatgcagaccctatgtggcgtggttcaaagtggaaatgcctgctggtaaggtgggatgatgatggtgagtttcgtcgaccaaacagggtatctccttgggagattgagctgaccagttcagcttcaggatcccatctggccgcaccaacttcaaagcggatgaagccataccttccccatgctaatccggaattcacagttccacatggaggtggtcgccctgattttgctgagtctgcacaa

SEQ ID NO: 9677 - DNA, 385 bp, Triticum aestivum
  Clone ID: uC-tsrow189077f07b1
tgtgacgcgtgggtgcccggggctggagcggtacagctggtgggtgtacatcgggctggtgctggtgtcggcggccgtgatgctgtccctcatcttctgggtgatctacgccagggagcggcgccaccgggcgtacaacaaggcgcaccggggcgacaagccggcgccgatgggcgggaatgcctgatcagcgacgaccgtttcgcgcgttcggtcgccacggatggcgtcagtgagtgtagagagtagaggaccgccgcgtggttgacttgattgctgcctgttgattgattctttcttcgtttttgtgaatctgatgcttgctagtatatttgtttgtgttcctgctcggttgatgtacagtttgtgatctactaggaatgaa

SEQ ID NO: 9678 - DNA, 436 bp, Triticum aestivum
  Clone ID: uC-tsrow189077f08b1
ttttctcaggccaccaagatagctcctgcagctgctaaaaggaaggaggagtccagtgattcctcagacagtgatgagagtgatgaagagcctccccagaaaaagcagaaggatgctgcgaaggttgctcctaagtctgccaaaaaggacagcagcagtgatgatgacagttctgatgaaagctctgatgatgagcctaaaaaggaagttacaactgccacaaaatcacagaaggaagagcctaatactcctgctagcaacaaaggtcaggcaacagggtcgaagaccctttggatggggaacctttccttcaatattgagtatgatcaagtgaagcaattttttgcacaaattggagaggtcgttgatgttcgcctggctacccatgaagatggccatcccaagggatttggtcatgttgagtttgctacggctg

SEQ ID NO: 9679 - DNA, 301 bp, Triticum aestivum
  Clone ID: uC-tsrow189077f09b1
tttctctagcggctttattacctaccgtgaagaagagagataaaaaggttcgagtgcgttctagagtgaggagtgtgaagagatggctccggtgaagctgttcggcgcgaccctgtcgtgtaacgtcaccaggtgcgtggcggcgctggaggaagccggcgtcgagtacgagctcgtccccatcaacttcggctccggcgagcacaagggccccgaccacctcgccaggaacccttttggccaggtgccagctttgcaggatggtgacttgtacgttttcgaatcacgtgctatttgcaag

SEQ ID NO: 9680 - DNA, 486 bp, Triticum aestivum
  Clone ID: uC-tsrow189077f10b1
tttttacaagaaggttgaactggcccaagccacagttgatggagtcaaagttgatgggcttgatacaaacctggtagtgatgaaggaattgttatcaccggtaagtgacctttggagggtttttggtgtcgttggcattgtgggatgagcctttgaagtcattcgtcttttgcttgttatcttcttctattatcataaggggatgggtagtctattttcttgttatggtcatactgttatcagcaacggtcatgctgctgacaagactaactagtcaaggaaagccaatgactgaggtcaaggtgacatctccaccttcaatgaacactatggagcagctcttagctgttcaaaatgctatttccaaagttgaagagcttgtccaggatgcaaatattgttcttctgaagataagagctctactgctggctttttcatctcaggccacagacaaagctatccttgcgctgttattgatggctcttg

SEQ ID NO: 9681 - DNA, 466 bp, Triticum aestivum
  Clone ID: uC-tsrow189077f11b1
ttcggccagggcggcggtggctacggcggccagcgtggtggcggcggctacggcggtggctacggcggcggcggtggcggctacggcggccagcgcggcggcgactccggcgggcagtggaggaactgagcggcggggccctccagttatcgatctatctaccatctcgtcgtcttcgtcagcaagttatcttcagtgtcgtcgtcgtcgtgttcctgtgtcagtcagtcttgagtcgtgtgtgtcgttcggtcctgtggtgtttttgatcgcgagctcgagtgtcgctctgtccggggttaattagagctggttacgcgaggaagaaacaacatgtgttatctttcagtcggtcgtgttcgtcggtgatgcagcaatcccttctgtcatggattgggatgtgatgttggaatcctatgtttgaagtcagcttaaatggatgaagaaaatgcaagtgatagctgcg

SEQ ID NO: 9682 - DNA, 268 bp, Triticum aestivum
  Clone ID: uC-tsrow189077g02b1
ggctgatgacggccaccctgcacggcacgggtgcttttggcgtaataatgcccggcctcttccagtcaacgtgagttggtccgactgggcggaggagagcgactcttatgtggcctggcaacctgtgtcaatatgccttcgacgccaccaaaggctggtacaaattcagaaaaaaggacctagttggaaatttgacattcgccaagagacttggagagggcactgttgattcgcttgttcttgactggtcaattagcgatgggagatg

SEQ ID NO: 9683 - DNA, 287 bp, Triticum aestivum
  Clone ID: uC-tsrow189077g04b1
ggctgtctccccgtgggcgctcatcctcctcctggccgcggtcttcaccgcaggggccggcgcgacgaccttctccatcactaaccgctgctcctacccggtttggccggcggccattccgggtgggtggcggcagacggctcaacagtggcgacacctggaacctcgaggtccctggcggcaccagcgccgtcaggatctggggccgcacgggctgcaacttcaacggcgacagagggagctgcgccaccggcgactgcgctggcgctctatactgtggcttgtcc

SEQ ID NO: 9684 - DNA, 92 bp, Triticum aestivum
  Clone ID: uC-tsrow189077g05b1
tcgtgatgctacagagccaacagccgcccccgtcgccgtcttcatgaagcgaggcgcaaaggccatggcaaacatcaggaagagaccggcca

SEQ ID NO: 9685 - DNA, 394 bp, Triticum aestivum
  Clone ID: uC-tsrow189077g06b1
cgtatggcgaatcccaagagcgaactcagatcatcctacgaccagacgcgaccacacaggataagatgctgctgcttaatccggcgtccgaggcggcggcgctggacagcatccggcagcagcttctggaggagccggcgcggccggcgtactgccggagcgcgagcttcggcagcctggtggcggaccagtggagcgagtcgctcccgttccgtcccaacgacgccgacgacatggtcgtctacggcgccctccgcgacgccttctcctgcggctggctccccgacggctccttcgcggccgtcaagcccgagcccctgccctcccccgacggctcctacgacggctcctgcctcggcagcttcctcgcgccgccggcgcccgggccggacgc

SEQ ID NO: 9686 - DNA, 454 bp, Triticum aestivum
  Clone ID: uC-tsrow189077g07b1
tttgtgcagcgactaatgtgaagatagcagcagttccttcaagtgttgtggttttgacggaggaaacctttgactcagttgtccttgatgaaaccaaagatgtccttgttgagttctatgccccatggtgtggtcactgcaagagtcttgctccgatatatgagaaggtggcttctgttttcaagcaagatgagggtgttgtgattgctaatcttgatgctgacaaatacacaagcctggctgagaagtatggagtttctggttttcccacattgaagttcttcccgaagggtagcaaggctggtgaagagtatgagggtggtcgggacttggatgactttgttaagttcattaatgagaaaagtggaactagccgtgattcgaagggtcagcttactttaaaggctgggcttgtggcaagtttggatgctcttgtcaaggattttcacagtgc

SEQ ID NO: 9687 - DNA, 372 bp, Triticum aestivum
  Clone ID: uC-tsrow189077g11b1
ctcagattacaccgcgctctcttcctcccttgggcataacaagacgaagcgccggacgccgctccgtcccatcccaccagccaccggcgcctcgggcctcggcgccaccgcccagagttcgttcgttccggcgggactgttggatcgatggccgccatgaaggtcgtgctgaagctggacctgcacgacgacaagcagaagcagaaggccatcaaggtcgtctccactctccacggcatcgaccagatcgccgtggacaccaaggacgacaagatgacggtggtcggcaccgtcgaccccgtccacgtcgtcggcaagctgcgcagcaagctctgccgcacggcacagatcgtctccgtcggcccggccaag

SEQ ID NO: 9688 - DNA, 379 bp, Triticum aestivum
  Clone ID: uC-tsrow189077h02b1
tgctcacgtcaccccccaccactgcctcccagcatcacatgcgtgcctcccccatcttcttcctccccgcaactcgctgctcctcccacaaccgaagctcactcccgtggccacgcagaacaaaatgcagcgagcaattcaagctatcggatcacatggcagtgtgctcaaatctgctgtcctgcaacacatcagtgttgtgaagcctgctatgctgcccgctgtgttcccacgcttcatgtcagtatcatctgctcaaatagaggagagtggatttgagagcagcactgttgcagacattttgaagtctaaagggaagagtgccgatggatcatggctttggtgcaccactgatgatagtgtctatgatgctgtcaaa

SEQ ID NO: 9689 - DNA, 412 bp, Triticum aestivum
  Clone ID: uC-tsrow189077h05b1
cgttatcaactacgaggagagcgacgacgaggagggctttttcctcccctccggccaggcctccgcgccgcccccgtccgcggccggcgacaccctggaggcactcaaggggtttggtgcagagcgcgagcgtcgcggagcggaaccttctcgccgacgcttccaggatcgccgagcggtgcggccggacctgcaagggaaaggccgagtgccgtcgcgccgtcgccgacggcctccgggccctcggttacgacgccgccgtttgcaagtcgcgctgggagaagactaagtcctaccccgcaggggagcacgagtacatcgacgccgtggttggggacggagggcggctgatcgtggaggtgcacttcaggtccgagttcgaggtggcccggtcgaccaaggcgtaccgcgc

SEQ ID NO: 9690 - DNA, 178 bp, Triticum aestivum
  Clone ID: uC-tsrow189077h06b1
agctgatctagctcacagctcacgagtactacgtgcatgtatacgtgttgatcggggcgaagttagcgtatacaagtggcgagcggtacctagaggcaggggagagggaagctagaacagtggtcgcggccatgggtgcccaggagatcaagtacttctcgcaggcgaagcttggccg

SEQ ID NO: 9691 - DNA, 431 bp, Triticum aestivum
  Clone ID: uC-tsrow189077h07b1
tgttgccaatgtggcctgagggtgttcccgagagtgcatctgtgcaagcaattctggactggcaaaggagaacaatggagatgatgtacactgacatcacacaagctctcgaggcaaagggaattgaagcaaaccccaaggaatacctcactttcttctgcctaggtaaccgggaggtgaagcaggatggggaatatgaaccccaggagcaaccagaacctgatactgattacgttcgtgctcaagaggctaggaggttcatgatctacgttcataccaaaatgatgatagttgatgacgagtacatcatcattgggtctgcaaacatcaaccaaaggtcaatggacggtgcccgggactccgagattgccatgggcgcttaccagccataccatctagccaacagggagccagcccggggccagatccac

SEQ ID NO: 9692 - DNA, 317 bp, Triticum aestivum
  Clone ID: uC-tsrow189077h08b1
tggcctgagggtgttcccgagagtgcatttgtgcaagcatttctggactggccacggataacaatggagaggatgtacactgacatcacacaagctcttgcggcaatgggaattgaatcaaaccccaaggaatacctcactttcttctgcctaggtaaccggcaggtgaagcaggatggggaatatgaaccccaggagcaaccagaacctgatactgattacatccgtgctcaagaggctaggaggtttatgatctacgttgataccaaaatgatgatagttgatgacgagcacatcatcattgggtctgcaaacat

SEQ ID NO: 9693 - DNA, 177 bp, Triticum aestivum
  Clone ID: uC-tsrow189077h09b1
gtagcgcaaccaccatgacgcctacccgctacctcgcggtgctggccgccgccgccgcgctactcttcatgctcggcggcctgcacggcgttaaagcggggccggcggacacctgactgcgccgttgcccagacggcgttcggcgactgcaccggatacgtcgccggcgtggaggac

SEQ ID NO: 9694 - DNA, 281 bp, Triticum aestivum
  Clone ID: uC-tsrow189077h10b1
tgttctcagacacttctcccgtcccgtccccaggcgaccttctatccccgtctcgcgtcgtatcggcagttccactccctcgccatgggcaagattaagatcggaatcaacggttttctgatgggatcgtgaggctctgtcgccagggtcgccctccagagcgacgatgtctagctcgtcgccgtcaacgacccctttatcaccaccgagtacatgacctacatgttcaagtacgacaccgttcacggccactggaagcacagtgacatcaagctcaagga

SEQ ID NO: 9695 - DNA, 197 bp, Triticum aestivum
  Clone ID: uC-tsrow189077h11b1
gtacagcgggttgggggcggagatgagctgtgtctatgtgggccaccaccaccaccaccaccaccaccgattcgttccgtcgcagaataaaaaaaaaacacaccactaccacattgtactggttctacatcaccaggcggaagccccccagcccttccccaattcattccgttcgttccccattcccctcccgcaat

SEQ ID NO: 9696 - DNA, 216 bp, Triticum aestivum
  Clone ID: uC-tsrow189078a04b1
tgcaggtggcggagcggatcccgtacgtgggcgtggacttggagttcccgggcgtgatccactgccccagcaagcaccacgcgacgctgaccccgtcggagcggtacgcggcgctcaaggcgaacgtggacgcgctccacctcatccaggtgggcctggcgttcgcggcgtcccccgacgcggcgccggcggtggcgttcgagatcaacctgcgcg

SEQ ID NO: 9697 - DNA, 88 bp, Triticum aestivum
  Clone ID: uC-tsrow189078a06b1
cccacagcacccgcagcagccggtcggggatgatttacgaccaggccgtttccaagtcccgcaaggtgatctccatcctcgaccgtac

SEQ ID NO: 9698 - DNA, 284 bp, Triticum aestivum
  Clone ID: uC-tsrow189078a07b1
ttctgcccacgcgtccgcggacgcgtgggaccgttgacgctttaccgcacgcgctgcacgggcacccaacacaagcccttctccgatcgtgctcgctcgccgccggtactagtctagtagagcagcggggaggagctccgagatgagggcgccgcggaggccgatggcggtggtgctgagctgggtgcggaggcagccgcccaaggtcaaggccttcctcgccgtcgtcgcgggcatgaccgcgctcgtcttcattcgcttcatcgtccacgaccacgacaacc

SEQ ID NO: 9699 - DNA, 251 bp, Triticum aestivum
  Clone ID: uC-tsrow189078a10b1
tcgcaactacagagggctccggggagagatgtgggattttctgaatggtatcctctttccgagaaagaaatcggtgttcgcccagcagtagcacccgagtctcgccggattaatggaagtgcaggatcatctttcgaggacttccagattctccatggagatatgcaaggattaaccgatactatggctttcctgacaagtttatctgggcttgttggaaacgatccgaggatccctgagaagcaatcccg

SEQ ID NO: 9700 - DNA, 161 bp, Triticum aestivum
  Clone ID: uC-tsrow189078a11b1
ccacccagcgccctggctgctcgccaccggcgagctggtgccgcgactccaccatgaagctgaacatcgcgaaccccaccacggggtgccagaagaaggtcgagatcgatgacgaccagaagctgcggaacctttatgacaagagaatctcccaggaggta

SEQ ID NO: 9701 - DNA, 285 bp, Triticum aestivum
  Clone ID: uC-tsrow189078b05b1
tggctccccagcagcacccgcagcagccgttcggcgatatctccgaccaggccgttttcaagttccgcaaggtgatctccatcctcgaccgcaccggtcacgcccgctttcgccgcggccccgtccagtcggcgcctccgccgtcgccttctccagcaccggtcgctccacctcctcccccacctttgaccgtcgtggcgccggtgtcggtggccgccccgctcccgcagccgcagagcctgacgctggactttaccaagccgaacctgaccatgtcgggcgcga

SEQ ID NO: 9702 - DNA, 192 bp, Triticum aestivum
  Clone ID: uC-tsrow189078b06b1
tggacgcgtgggtgcgagtgatggatgcctaggcgcacacgaccgatgaaggacggggactcccgccgaaacgggtaggcgagccggagtcaggctttgaccctaccatctccgaatggggcaaccccaccaccgtgatgggtggtgatcctgtggtgaatctatagtcacaggaagggcaccgggggaact

SEQ ID NO: 9703 - DNA, 306 bp, Triticum aestivum
  Clone ID: uC-tsrow189078b07b1
atcggcaaggctgatgttgttgtcagaggctatggtgggtacaactcaagatgggccctgttcctgatccagcgcattttccccctggttgggttaccacctgttgcgacgactattttctttggcgctaatgatgcagcgcttccaggacgaacaagtcagcggcaacatgttccggttgaggagtatagacagaatctcaaaacaattgttaatcatctgaaggattgttccaagtccatggtaattctgcttatcactccacctcctattgatgaagatggaagagaaagatatgcacgatcg

SEQ ID NO: 9704 - DNA, 394 bp, Triticum aestivum
  Clone ID: uC-tsrow189078b08b1
ttctgcccacgcgtccgctcgaattcttatcgatactggatctcagagcataggagggaaagtcgatttatggatggaatcaaatacgcagtatttacagaaaaaagtcttcgtttattgggaaagaatcaatatacttttaatgtcgaatcgggattcactaagacagaaataaagcattgggtcgaactcttctttggtgttaaggtggtagctgtgaatagccatcgactacctggaaaaggtagaagaataggacctattctgggccatacaatgcattacagacgtatgatcattacccttcaaccgggttattctattccacttctagatagagaaaaaaactaaaggagaatacttaataatacggcgaaacatttatacaaaacac

SEQ ID NO: 9705 - DNA, 355 bp, Triticum aestivum
  Clone ID: uC-tsrow189078b10b1
cccccgggacggggcccatgccgacgggtttggttgtgcatttatagcccccctccctcccctcctcgctccctgggcgagcgagattgatcctcctccctgccctcgcgccgcaagtatctgacaggcgcgctgatttgggggggatgggctgcttcgggtgcttcgccccggcggcgcgccgaggggccggcgacctcaagccctccaagctcgcccaccactgcaccgacgacgactcagtcgcggacccgcagaggaaggtggcgccggacgtggggagcggctgcgcgcacagcttcaccttcaaggatctgcttcgcgccaccggctacttcaacgaggccaatttcat

SEQ ID NO: 9706 - DNA, 285 bp, Triticum aestivum
  Clone ID: uC-tsrow189078c04b1
ttcacgcgtccggaacaagatcaccatcaccaacgtcttgggcaggctgagcaaggactacattgagaagatggtccaggacgcagagaagtacaagtctgaggacgaggagcacaagaagaaggttgacgccaagaactccctggagaactacgcctacaacatgaggaacaccatccaggacgagaagatcgcctccaagctgcccgctgacgacaagaagaagatcgaggacgctgtcgacgctgcgatccagtggcttgacgccaaccagcttggtgaggt

SEQ ID NO: 9707 - DNA, 325 bp, Triticum aestivum
  Clone ID: uC-tsrow189078c05b1
tccacgcgtccgcggacgcgtgggtggtcccagtgttctgttcgctagtgattcatggatcagcactgatgacatgagggctcagtatctgcgaagtaagggaatattagtctggaagatggacaaccggggatctgcacggcgaggtttgcattttgagggacagcttaagtacaacattggtcatgtcgatgctgaggatcaactagctggtactgagtggctaataaagcaaggccttgcgaagcctggacatattggtctgtatggctggagttatggtggttttctctcggcaatgtgcctatcaaggttttccgacaca

SEQ ID NO: 9708 - DNA, 305 bp, Triticum aestivum
  Clone ID: uC-tsrow189078c06b1
tgccatgcgcgccgaagagaagccccatgccgtgtgcttttcgaacccggcgcaggtgcacgccaccccgatgatgaagctggccaaggtcctccactccaggggcttccacgttaccttcgtctacaccgagcacaaccaccggcgcctcgtccgttcccgcggcccaggtgctgtcgctggcctcccggactttcgcttcgccaccatccccgacggcctgccgtcgtacgaccccgatgccacccaggaccaggcgtccatttgccactccaccacgaccacctgccttccccacctgaaga

SEQ ID NO: 9709 - DNA, 292 bp, Triticum aestivum
  Clone ID: uC-tsrow189078c09b1
ggagagaagagtgtcatcaaagaaggtcacaaaagcttcccaagtggacactcatcatggccttttgccggcctaggctttcttacgtggtacttgactgggaaaatcgcagtttttgaccgtaaaggtcatattgcaaagctttgtattattgttctgcctctacttactgctgcacttgttgctgtttctcgagtggatgactactggcatcactggcaagatgtggttgcaggagctgttttaggtctcacagaggcttcattttgctacctgcaatttttcccatacc

SEQ ID NO: 9710 - DNA, 357 bp, Triticum aestivum
  Clone ID: uC-tsrow189078c10b1
tcgaaccccgaccccatctcaccaatcccgcgtactgtaaaccctgccagctgggcggcgggatgggcaacccggagaagctgatggcgcagatcttcgacctcaagtcacgtccaagtcgctgcagcggcaggcgcgcaagtgcgagaaggaggagaaggagcagaagctcaaggtgaagaaggccatcgagaagggcaacgtggacggcgcccggatctacgccgagaacgccatccgcaagcgcaccgagcacatgaactaccttcgtctcgtcttccgcctcgacgccgtcggcgcgcgcctcgacacgcaggccaagatgcaggccatcggcaagtccatgggcagcatcgt

SEQ ID NO: 9711 - DNA, 246 bp, Triticum aestivum
  Clone ID: uC-tsrow189078d02b1
taccgccacgccgcgcggcccatcccctgacgacgacggtcatggcggcggcgatgtcggtgtcggccgtggtcccgccggcggcggcggtggcgcgcgcgcggacgctgctctgcgtacccgccacggcgcgcgcgccgcgggagatggcggcggaggtggctgccgcagccgcttctcggcgccgacctggctgaactccgcctcgaccgcctagccgggttcgccccgcgccgggacctgccc

SEQ ID NO: 9712 - DNA, 378 bp, Triticum aestivum
  unsure (1)..(378): unsure at all n locations
  Clone ID: uC-tsrow189078d05b1
tcccacgcgtncgcggacgcgtggcggacgcgtgggcgcctacaagcgccgctccgactgcatctacatcatcaatctgggcaagacgtgggagaagctccagctcgcggcgagggtcatcgtcgccatcgagaacccccaggacatcatcgtccagtccgcccgcccctacggccagcgcgccgtcctcaagttcgcgcagcacaccggcgccaacgccatcgccgggaggcacacccctggtaccttcaccaaccagatgcagacctccttcagcgagccccggctgctcatcctcaccgacccaaggaccgaccaccagcccatcaaggagtctgctctggggaacatccctaccattgccttctgtgacaccga

SEQ ID NO: 9713 - DNA, 97 bp, Triticum aestivum
  Clone ID: uC-tsrow189078d08b1
tttgtcgcccgcaaccaccaccaccggaccaccgagaccggtgttgaaggcacgatgagggagatcctgcacatacagggcgggacgtgcgggaacc

SEQ ID NO: 9714 - DNA, 277 bp, Triticum aestivum
  Clone ID: uC-tsrow189078d09b1
tttcgaaccccgaccccgatctcaccaatcccccggaacttaaaccctagccagcggtggcggcggcgatgggcaacccggagaagctgatggcgcagatcttcgacctcaagttcacgtgcaagtcgctgcagtggcaggcgcgcaagtgcgagaaggaggagaaggagcagaagctcaaggtgaagaaggccatcgagaagggcaacgtggacggcgcccggatctacgcctagaacgccatccgcaagcgcaccgagcacatgaactaccttcg

SEQ ID NO: 9715 - DNA, 397 bp, Triticum aestivum
  Clone ID: uC-tsrow189078d10b1
tgtcgcccacgcgtccgaaaagaacaaaaataaaaaaaattagacagagagccacccccatcgcctcgtctctcctctcctcgcagatctttcccgtctccggtcaccatgaactcctactccggcgaccggtcctcctcccgtcccaccacaacctccttcgactcctaccagtttgacttcggggccaacgcctcccgctcctccacctcccgccccctccgcgaccagaggccaggcggcgccaccaacccttcaccgaggccaaccaccacaaacacatggtcacaccagccggtgaagacgtcctggactcatcagccatccccgtccgtcgccgcggcgctcggatccgggcctgtgtccatggtcggcgacatctccggccggagctggt

SEQ ID NO: 9716 - DNA, 60 bp, Triticum aestivum
  Clone ID: uC-tsrow189078d11b1
gagccccgcccctcctcctcctccttctgctccttgtactcctccaacaacagccctccc

SEQ ID NO: 9717 - DNA, 380 bp, Triticum aestivum
  Clone ID: uC-tsrow189078d12b1
gcccacgcgtccgcctacaccggcgaggcgttggtttgcgcccctcgccgcgcccggcacacctccctcctccactccccccgcacccgaccccttcgcccccgagcttgtttctccagctaccgcaccggagcggcatggcgctcacgcgaccatcgacgggctatgaaggaggaggagacatggcatggaggtggtggccacttggtagccttcgtctgcagcgccataccactgtcggggtgccgcgcaagaggtcaggtccgtcgccaccgcgagccaggggacgctcgttggtgatcctacgtgcaggaagccaacggggggcacggtatcaacaagccgacaggaggcggggtcttcccactgggatggaggag

SEQ ID NO: 9718 - DNA, 183 bp, Triticum aestivum
  Clone ID: uC-tsrow189078e01b1
tggatggcgcaagggatgacaagtatggcggtagcatctgcagcagacgctatgggcctgaccgcggaggtgaacgctattctggaagtcgagatggaggaagccccggcagcggtggcggcgatcgatacagccgagacaggcctggaccgtatgatcgacgcagccgagatgaatactgat

SEQ ID NO: 9719 - DNA, 371 bp, Triticum aestivum
  Clone ID: uC-tsrow189078e02b1
tagcagccgccgccagcagctgcgcaaaggctccacatatcctaaccctagctccaagcttagcttccatcttctcgatctagctagagccatggcgccgaccaagggcgaggggccggccatcggcatcgacctcggcaccacctactcgtgcgtcggcgtgtggcagcacgaccgggtcgagatcatcgccaacgaccagggcaaccgcaccacgccctcgtacgtcgccttcaccgactcggagcgcctcatcggcgatgccgccaagaaccaggtcgccatgaaccccatcaacaccgtcttcgatgcgaagcgtcttatcggcagaaggtttgctgatgctcctgtccagagtgatattaagatgt

SEQ ID NO: 9720 - DNA, 317 bp, Triticum aestivum
  Clone ID: uC-tsrow189078e03b1
tgcctcccctcccctccattccatctccaacccattaaacaaccggagccgtcctcctcctcctcctccccccaccagatctcagatccgcggagctccgccgcgcctcccatggcggtcaaggtctacgtcgtgtactactccatgtatggtcatgttgctaagctagctgatgagatcaagaaaggtgcttcatctgtcgaaggcgtggaggttaaagtgtggcaggtccctgagatcctgaacgaggaagtccttggcaagatgggcgccccgcccaagaccgacgtgccggtgatctccccgcaggagctggc

SEQ ID NO: 9721 - DNA, 362 bp, Triticum aestivum
  Clone ID: uC-tsrow189078e04b1
ttccgacccgaccatgtccctcaagatcaagcgcggtctgcgcgagagaatcgtggagtccgtctccgaggccatggcccagctcgagatcgaggactcctccgccgaggacctcaagaagaaggagctcgccctcaagagactcatcaccaaggccatgtcctcccgataaatgtatcgcttccttcccttttttgctggctctggcgtctttttttgagattcctttgtttttcggaaaagcaagaaaatatcttccgggggaaaaaaaaggggccttctgtttctccagcccagatctcggtaccatgatctggcacatgacttgatgcccttttttgatacacacttacgatagacac

SEQ ID NO: 9722 - DNA, 220 bp, Triticum aestivum
  Clone ID: uC-tsrow189078e05b1
gccggcgccgacccggtcctggccgcctcgtgcaccatcatcagcctgcagagcctggtgtcccgggaggccgacccgctggactcgcaggtggagccggtggccatggtcaactgtagcggcggcgacccggcggatccgttggtgctgggcggcacgttccgggccttctcgaacgcgagcttctacacgctgcggcggcggatcgaggaggtgatga

SEQ ID NO: 9723 - DNA, 237 bp, Triticum aestivum
  Clone ID: uC-tsrow189078e07b1
ggagtcatactatccatttaacttccttaacaacaattactcaattgccccatgtggaaatgtccttgcaagacactgaggcggagctggtcataccatatatagctacaaccactcattatagtgccttgactggtttctatgattggggtacagacttttgttatgtttattccccattagcaactggtacggctagcaatactgttcgctatactgcttggatgagctttgatg

SEQ ID NO: 9724 - DNA, 327 bp, Triticum aestivum
  Clone ID: uC-tsrow189078e08b1
cacgcgtccgcccacgcgtccgacagagtgctgtcattgatccggcggcagtgctgggatattttgtaccatcaacgtatcagaaatggagcctctcagagatcatggcgcgagctgcttgccgatgatgatcatggcgctgctgtgcctgggcggcgcggcttgtggccagctgagcgacgacttctacgacgacagctgcccgaagctggagagcatcgttcaggcgcgcgtggccgccgcgatgaaggccgagctacggatgggcgcctccctgctccggctccactttcacgactgctttgtcaacgggtgtgacgggtcgat

SEQ ID NO: 9725 - DNA, 238 bp, Triticum aestivum
  Clone ID: uC-tsrow189078e09b1
ggcagctccaaggggctgacctcggccatgtccaatatcgcgcgcggctcgagccggatggccgagagcgacggcgctgctaaggacaagccctagcacgatctgtgactgagggagaacgcacacacaagacggacattgccagtgagctcatattttggattccccggcttctgaaaatcccagatgatgagaagagaaacgcgaaaattccatggaagctttaggtaggaaccaa

SEQ ID NO: 9726 - DNA, 92 bp, Triticum aestivum
  Clone ID: uC-tsrow189078e10b1
tgcgttcgcccacgcgaacggccacgcgtccggctcgccactgtaccactagttccaccactgcccccccggcctgctgctgcagctgcata

SEQ ID NO: 9727 - DNA, 84 bp, Triticum aestivum
  Clone ID: uC-tsrow189078e12b1
tcgcccacgcgtccggccgggcagtccggcgagggctttatctgcggctacaactgcaagtgcaacccctgcaactgttaagct

SEQ ID NO: 9728 - DNA, 229 bp, Triticum aestivum
  Clone ID: uC-tsrow189078f02b1
acacgacgcaaaaacttctgaaactgagcttttgtaggcacatagagcttcttaagatgagcgtggagatcctggacgggaggacggtgcagagcttcttagaggacgagggcgccttcaacgactccgtcgacggccgattcgctgcgctcgacgccgaccacgacggcctcctctcctaccccgagatggcccgggagatcatgagcctccgggtcctcgagaagca

SEQ ID NO: 9729 - DNA, 281 bp, Triticum aestivum
  Clone ID: uC-tsrow189078f03b1
tcaccgacccgaccatgtccctcaagatcaagcgcggtctgcgcgagagaatcgaggagtccgtctccgaggccatggcccagctcgagatcgaggactcctccgccgcggacctcaagaagaaggagctcgccctcaagagactcatcaccaaggccatgtcctcccgataaatgtatcgcttccttcccttttttgctggctctggcgtctttctttgagattcctttgtttttcggaaaagcaagaaaatatcttccgggggaaaaaaaaggggcctt

SEQ ID NO: 9730 - DNA, 101 bp, Triticum aestivum
  unsure (1)..(101): unsure at all n locations
  Clone ID: uC-tsrow189078f04b1
tcnttgacaccaccgcagtcaccgcccggagcagagaagtcagggagggatcgatcgcggacgatggcggcccggggaagcggcgcggaggaggcgcctcc

SEQ ID NO: 9731 - DNA, 282 bp, Triticum aestivum
  Clone ID: uC-tsrow189078f05b1
tgatcggcggcggcggcggcggcagcgggagagagatttttggagagagctccagccatggtgcacgtcaacttctacctgaactatggtaagacattcaagaaaccaaggctgttcttatgagaaggagcgttttgatgcagaactaaagctggatggtgagtatggactgaggtgcaagcgtgagctctggagggttcagtatgcattgagcaggatccgtaatgcggcaagacacttgcttacactggatgagaagaatccccgccgtatctttgaggg

SEQ ID NO: 9732 - DNA, 284 bp, Triticum aestivum
  Clone ID: uC-tsrow189078f06b1
tgctgcggcggcggcggcggcagcggaagaaagaggtttttgctccagtcttggtgcacgtcaacttctaccgcaactatggttagacattcaagaaaccaaggcgtccttatgagaaggagcgtcttgatgcagaactaaagctggtcggtgaatatggactgaggtgcaagcgtgagctctggagggttcagtatgcactgagcaggattcgtaatgctgcaagacacttgctcacactggatgagaaaaatccccgccgtatctttgagggcgcggccctt

SEQ ID NO: 9733 - DNA, 265 bp, Triticum aestivum
  Clone ID: uC-tsrow189078f07b1
gcccacgcgtccggcgagagatcgcatgaatggtgtttatccagaggacctcagttgtcctatagaaatatgtaggttatctacggtggttgtttcgcgatcattttgctatattgatcagcctgatgctctctgggcccgtgagattttgttgccacagatcagttgatcttggttctgaactctgctgttgtaacttgtaagtcttccatcaaactggcaatgtctcattttcacccattggtgtattatattccttccattc

SEQ ID NO: 9734 - DNA, 241 bp, Triticum aestivum
  Clone ID: uC-tsrow189078f08b1
gccacgcgtccgggagagatcgcatgaatggtgtttatccagaggacctcatttgtctatagaaatatgtaggttatctacggtggtcgtttcgcgatcattttgctatattgatcagcctgatgctctctgggcccgtgagattttgttgccacagatcagctgatcttggttctgaactctgctgttgtaacttgtaagtctttcatcatactggcaatgtactcattctcacccattg

SEQ ID NO: 9735 - DNA, 312 bp, Triticum aestivum
  Clone ID: uC-tsrow189078f09b1
atcgcggacccgtgggtctggctttgctctcgtcttccttaaggccatccatcctgccttttaaatcagtatttctcctggctggaatgctcgatcctttcgtggcttaactagaacttaagccaataagtagctattatgtcgagtagctgcatcttcataatgctctattcatgtttagcttatcctttggtgtgctttgtcatgagtggagtcccaggttgctttatctctagcttaaagctagagtagcctcactgcttatggaccaaattatctagtctgcatctctattctacagaatcatatatt

SEQ ID NO: 9736 - DNA, 241 bp, Triticum aestivum
  Clone ID: uC-tsrow189078f10b1
acgaatgagctccatatgctccccttgggcatgtttgtcctcctgatatcgatgaccatagccgattgcttcaacaaaggtgtgtatgaccagatcgtggtgatgaaaggcttgccattcatggaggctcatgctgaacctgacatgaggcactaggtagctagtgatgttgtgtctgggccactcatctccttttcgggtgttgagaaggtgggcaacatcgttcatgcgttaaggatca

SEQ ID NO: 9737 - DNA, 192 bp, Triticum aestivum
  Clone ID: uC-tsrow189078g01b1
actagcgctcgtcaccccccaccactgcctccgagcattacatgcgtgcctcccccatcttctccctccccgcaactcgctgctgctaccacaaccgaagctcactcccgtggccacgcagaacaaaatgcagcgagcaattcaagctatcggatcacatggcagcgtgcagaaatctgctgtcctgcaaca

SEQ ID NO: 9738 - DNA, 267 bp, Triticum aestivum
  Clone ID: uC-tsrow189078g04b1
tccacgcgtccgccccagaccacgcagttcgtgcccacttcggcctcggtctctgtgccgcagccggcggcggccagcaagacacctgctgcccctacgagttctacaactgctgctgctgctagtgcggcgcccgttggctcttcttccaagaaagaagaagagaagaaggtcgagaagcagactccggagaaagccgccgctgcagcagcgcccactgtggccgaccctctcggcagcgcgagggggaaggtgcaggaggaggtg

SEQ ID NO: 9739 - DNA, 358 bp, Triticum aestivum
  Clone ID: uC-tsrow189078g06b1
tcattctgctattggagatgtcatctttgctttggccctttagaatgcttatgtgccctacagaaacagcaaactgactcaagttcttcagagctctttaggtgggcaagcaaagacgctaatgtttgttcagataaaccctgatgtggaatcatgttcagaaaccataagtactttgaaatttgctgaaagagtttctggggttgagttaggtgctgcaaggagcaacaaagagggcaaggatataaaagatctgctagaacaggttgcgtttttgaaagacacaatatcgcgaaaggatatggaaatggaacagcttcaagtcaaccaaagtcaaatctcccagttcattaacaga

SEQ ID NO: 9740 - DNA, 243 bp, Triticum aestivum
  Clone ID: uC-tsrow189078g07b1
gtcgctccctctcagctcggcctctccccctctccgactttttccgtccgtccggccggtggaacctaggcggggaggggcagggatgacgacgctggggaagaggcaccggaacagcagctccatgcggcggaccaccagcatgtcgggcttcgcggtgccgccggaggaggaggcggccgggcgccagcccacgcgggcggacaggggcgcctcggccgtgccggcgcagacggagtgggg

SEQ ID NO: 9741 - DNA, 242 bp, Triticum aestivum
  Clone ID: uC-tsrow189078g08b1
cccccccttgcaaccatcactttcattcaacatgcatcacgaaatggctacgcacgcacgcaaactgtacactttgcaagtacaacattctcaaaggcagtgaaaactgaaaactcaccgaggacttacactgacgtaacttccatactcaaggcctgtatgcatgaacatcctggagcaagcagcaagtgagaagccttgtgattcccgtctgtttgtaaactgatgatatcaatgagagt

SEQ ID NO: 9742 - DNA, 407 bp, Triticum aestivum
  Clone ID: uC-tsrow189078g09b1
tttctagctcgcagccatcggacgtcgccgtccgtgcgaagtgccgccgcccgaacctcccaccacagcacgccgcaatggaggccgaccgcccatggcatcgcccgagctcacctcccagcagtcattctcctttgaattcgtcgggatccggctggatccggacgccagcgccccgttcctacctccccacctcgcttgggtcgtcggccagctcgacgatgtcagactgctcgcgggatccagcgccaccgctggctggccacttcctcctggaggagacgcccccacatcggcgcctccccatatgagcagcagcagcgaacgcctcgctaagggcatctctggtggtgtttctttataaattgttttaaagaagtttgccagatctgtgactgaaaaacaat

SEQ ID NO: 9743 - DNA, 330 bp, Triticum aestivum
  Clone ID: uC-tsrow189078g10b1
tgtcgtcacgcgtccggtcagaattctggttgacggggatgtgaagagcaaagcacacttcctgtccgctgatgattttgagccagcacttattccatcaaagactattcctgaccctgacgacaagaagccagaggactgggacgagagagctaaaatccctgacccagctgcagtgaagcccgatgactgggatgaggatgccccaacagaaattctggatgaggaggccaccaagccagaaggatggttggatgatgagcctgaggaagttgatgacccagaggctgataagcccgaagactgggatgatgaggaggatggcgaatg

SEQ ID NO: 9744 - DNA, 300 bp, Triticum aestivum
  Clone ID: uC-tsrow189078g11b1
aactgctcgggcggcggcaacgagcttttcaagctcaaggtgatttccggcaggacgtacatgctgaggctcatcaacgcggcgctcaacgacgagctcttcttcgcggtggccaaccacacgctcaccgtcgtgcaggcggacgccagctacgtcaagccgttcgccgtcaccacgctcgtcatcttgccgggccagaccatggacgtgctcctcaccgaggccaccaaccccgtctccacggtcttcgccattgccgtcgcgccctacaccaacaccgtgggcaccttcgacaacacc

SEQ ID NO: 9745 - DNA, 53 bp, Triticum aestivum
  Clone ID: uC-tsrow189078g12b1
tgtcgaaaaaaaaaaaaaaaaaaaaaaaaaaaaaggaaaaaaaaaaagggcgg

SEQ ID NO: 9746 - DNA, 208 bp, Triticum aestivum
  Clone ID: uC-tsrow189078h02b1
ctcgatcttccggaagcattgcagaccattttgctacccggatgagcattacataccgacctatcttcatcttttccacgggtcgctcaacgccaacaggaccatcacatgggttgattggtcaagaggaggcccacatccagcaagatatggtgctggaaacatcaatgtggatttcatcaaggccatcaggaacaacggtacgcag

SEQ ID NO: 9747 - DNA, 143 bp, Triticum aestivum
  Clone ID: uC-tsrow189078h03b1
tagcacccgccaccccgctaacagttaacccggaaattttgccggcgcgggcattttcctccacctttccgccatggcggactcggcggcgcgctccctcgcgctcttatcctacgacggctcgctcgggctcggccgcgcct

SEQ ID NO: 9748 - DNA, 332 bp, Triticum aestivum
  Clone ID: uC-tsrow189078h05b1
ctgatctgaagagcaacactgaaggctctttttttcggtcagttgagattgccatacctggtgctgacctccccaaactgaaggatgtgagcgaatcaactttaaagaacggtactatttcagggagcttggaaccaaaagttgctaggcctgatcagttgaagaagaagcggaagaaggcagactcatctaaggctgttcatccaaacaatgctgactatggttacaacgttccatttgaccctgcatattgtaaccctttcaatggtgcatattcaatgggtccatttggtgtacctgatccatacatgtacggctcaatgggcatgccc

SEQ ID NO: 9749 - DNA, 210 bp, Triticum aestivum
  Clone ID: uC-tsrow189078h07b1
tatcgatggctcctcacgccgctggcctcctgtggctctttttgctcaccacctgcgcggtggacacgcacctccacttgttcctccacgacgaggtctccggcagcaacccgacggcggagcaggtcatcaagggtcctgcctagtcgtccaacgccctcccgggcgtggccttcggcgacacgaccgtcatcgacgacgcgctgacgg

SEQ ID NO: 9750 - DNA, 277 bp, Triticum aestivum
  Clone ID: uC-tsrow189078h08b1
tgatcggtcagcgagagagcagacggcgcccatgggttcctttatctgccccggcagcagcttacccaggaaggcagccgcgccaagaaccagcaacaaaacccgagcgtaggagacgagaggagaagagagaacctattctccccccactcccactcctcgccacacttggagagtcgtcggacgatcggcgccagtgcacaatgtttcaagggtgcggcctgttcgcgtgcgtgagccggcgcggcgccgacgttaggaagcggggcgaggcggg

SEQ ID NO: 9751 - DNA, 130 bp, Triticum aestivum
  Clone ID: uC-tsrow189078h09b1
cttccaagaaatagaaatggcggcgtgcggcaaagccacacgtttggtggcttggccttgctgctcctcctgtggggtgccaggccagcccttttggcactggagacggtactaccacacaagtgccccc

SEQ ID NO: 9752 - DNA, 191 bp, Triticum aestivum
  Clone ID: uC-tsrow189078h11b1
caaggcacttttctgtcgccaaaggataaaggtgctgctgaagaacctttgaaggctgtgggcacaaaacggctgcatactgatgctccttcaagccccgcttatcataatgtttatgtacggcgaaaggtggcaaccgaacataataaagtgaactcgcctccggagatgaaggttattggcaaggacaa

SEQ ID NO: 9753 - DNA, 435 bp, Triticum aestivum
  Clone ID: uC-tsrow189078h12b1
tcgtcggaagaccttatatccaatgtacacttattccaaattttttacggaagtggaagaaaataccatttatagttcagagaaacttcagaacctagggtggaccttcaggcctttagagaagaccctgggggacagcgtggaatcctacaaagcatctggcgtcctgaactgagcatccaaccagggaaagtttggctgttaatgcttgcaaactccttgtggttcatgtaagcagtgaaacaaaataagttggtgacacaatcgtcacgagagtctgtgtgaacatgaacaaagcatgaatcgtatgcgcgcctttcttttggtgtgtcttgacttgaggtgtatgcagcaccttcttttggtgtgtcttgacttgaggtgtttcgaggcatagtggaatgtcctggtggttctatgagtgggtgcttgcac

SEQ ID NO: 9754 - DNA, 379 bp, Triticum aestivum
  Clone ID: uC-tsrow189079a01b1
ttactcatcatctctgctttcctgctagcgaatgtaatgggccgcttccagtggtttacatgcccaagaaaggacctgtcaacagggtggcttcagtgtgatcctggccctatgtttaagccagagcattattatctgggagattgggtaccacattggtttccatggaaagatgtgttcctaatgcccgtgcagtggcatgctttatcccttggtttatttgcatcgataatcgcaccatttggtggatttttcgcaagtggcttcaagagggctttcaaaataaaggattttggggacagcatacctgggcatggcggaatcactgaccgaatggactgtcaaatggttatggcagtttttgcatacatataccacc

SEQ ID NO: 9755 - DNA, 233 bp, Triticum aestivum
  Clone ID: uC-tsrow189079a04b1
tatttatacgctttcggaaagtgggggttggtttcgctttgagctttttatccggggcagccagccagccagccagccgccgggccgggacttctgttacgagtgcagaggctagatagctccggccgtatccgattccgccggggccgggcgtggatacctaggctaggctaggcgccgccgatgtcggactgcagcacgggcacggactcgccgtgggccgactccgtcga

SEQ ID NO: 9756 - DNA, 349 bp, Triticum aestivum
  Clone ID: uC-tsrow189079a06b1
tttttctgttgggcgtcgaccaatcactggcctgaggctgtgcttggaaggaacaaaacagaaccgtctggctattcatttgcagcaccttggctcgttaccaaagatatttctacctcactgggactcgcatatcacgatcgggccaccaaaatggcaagggcctgaagagcaggatagccgatggttcgaaccaatcaagtggaagaattttgctcatgtcagcactgcgcccatagagtacaccgaaacaaatatcacggatctgtctggcgtttatattgtcacgggagcacagttaggagtgtgggattttggtgcaaagagcgtgctccaccttaaacttttg

SEQ ID NO: 9757 - DNA, 319 bp, Triticum aestivum
  Clone ID: uC-tsrow189079a07b1
ttcaaaagttaatctggcaaacagaagtgcacaaaggagttagatccccttccttatagtttagtaaattattattccctgttttttgagaacctattattcgttttcctatatactgatatactatgtgtgtatgcactttttagatggggtatgtgaagtgcagtgagttactgttgctagcctgagttgtgtgtacgtaatagaagccctcgtgtaaggaaactgcttaaaacttgtgactactgtgtctgtgtgtgaccatttcaatgtaactccccagtgtgtgttggtggctagttggctttagccacaccaa

SEQ ID NO: 9758 - DNA, 412 bp, Triticum aestivum
  Clone ID: uC-tsrow189079a08b1
tcgtttccctccctcggttcatcggcctcccgatcgagcagtagaagcagcgcaagagcaccgctagcactaaagaaatggcggccgagacgttcctcttcacgtccgagtctgtgaacgagggccatcccgacaagctctgtgaccaggtctccgacgccgtcttggatgcctgcttggcccaggatgccgacagcaaggtcgcctgcgagaccgtcaccaagaccaacatggtcatggtcttgggcgagatcaccaccaaggccaccgtcgactatgagaagatcgtgcgcgacacctgccgcaacatcggtttcatctctgatgacgttggtctcgacgccgaccgttgcaaggtgctcgtcaacatcgagcagcagtcccctgacattgcccagggtgttcacggaca

SEQ ID NO: 9759 - DNA, 343 bp, Triticum aestivum
  Clone ID: uC-tsrow189079a09b1
ttttccattcagctcgagcagggcgagtaaaggagcgtgcgcagagaaaggagtgaagagaggcaggccccaggccataattctcactctcagcagccaaatcaaggacaggcaggcgcagagcagaggaccaagctcgcaatgggcatgggcatggcttctcccttgctttcctgcgccatcatggcactcctagccgccgtgctttccccgccatccgtcgccggcgaccccgacttgctccaggacatctgcgtcgccgacctcacttccgccgtgaaggtgaatgggttcgcttgcaaggccactgtgaccgatgacgacttctacttcaaggggctgg

SEQ ID NO: 9760 - DNA, 331 bp, Triticum aestivum
  Clone ID: uC-tsrow189079a10b1
tctttttaatgctaagaggggagagatgattttagggatatttttgtcaatggagaacattgacaaaaacaatgaatacaaggagcttgcagccatgatggaatgaatctttgcgtggcagcctgcttaccgcccagatagtgagcccctgagctcctgaagaaaggacagttgaaggagatgaaagaagcgaacacaaaggatcctacgccaaagaatgaagaggccggggaaatgattgaagggggtgcgtggaggacatgtgcatggcggaagctggcgtgatgactgcgaaggtcaaaggagagaaggcttgcactagactcatttt

SEQ ID NO: 9761 - DNA, 295 bp, Triticum aestivum
  Clone ID: uC-tsrow189079a11b1
tctttcgtcttcgtactcgcctctctccgcgcaaccgagccttccgcccacctcctccccatttcgccagcggcgcacccaccaaccacccccacccgccgccatgagggagtgcatctcgatccacatcggccaggccggcatgcaggtcgggaacgcgtgctgggagctgtactgcctcgagcatggcattcagcctgatggccagatgcccggtgacaagaccgttgggggaggtgatgatgctttcaacacctttttcagcgagactggggctgggaagcacgtcccccgt

SEQ ID NO: 9762 - DNA, 432 bp, Triticum aestivum
  Clone ID: uC-tsrow189079b01b1
tttgtgctatacaagatgttttttatgttttctcccagcataaggtgctggctactctttttttggagtacattttatctatacttcacaaagaacctgttgcaacaaatgattcagaaaaaggggaaattaactcagagtcatcagctgatgactgtattctacaagcaactatgttcgctctcaatgcgttcctgagaggtggtgggaaggtcgggaaacaagcagttgagcaaagctacccttctgtcctttctgcacttatactgaagctgggaggtcttcacggtcttgctgaattaggccgcaatgagcttctacgatcgttgttaattgcattccagtcattctgtgattgtgttggcgatgtcgagatgggaaagatattagctcgagatggcgaacgaactgagaaggagaagtggattgatc

SEQ ID NO: 9763 - DNA, 407 bp, Triticum aestivum
  Clone ID: uC-tsrow189079b02b1
ttctcgcgtccgccgccgttttctcaacccacatggctctcgaagcgcgcctccgcctcccgctcgcggggccaactccggccaccgctttcctctcaggatccaaccccaaacccagtcacatatccttctccctcaaacccgcctccacttctctctccgccgccaatgcgccgccgcccatcgtcgtcgtgggctccgccaacgcggacatctacgtcgaggtcgaccgtctccctcttgtcggcgagacggttgccgcgagtgccggtcacagcctcgccggcgggaagggcgccaatcaagctgcctgcggggggcggcttgcgctggggcccacctacctcgtggcgcgcgtgggggacgacgccaacgggcgcctcctcgagggggcactcgcggacgcc

SEQ ID NO: 9764 - DNA, 395 bp, Triticum aestivum
  Clone ID: uC-tsrow189079b03b1
ttttcgcgtcctaagccatggtgcacaaggagaccggctgccagtctcgggagggtcccatcctttgcgtcaataactgcggattctttggcagtgcggcgaccatgaacatgtgctccaagtgccacaaggagatggcgatgaagcaggagcaggccaagctggctgcctcctctttcgacagcatcgtcaacggtggcgatgccgcgaaagaacaccttgctgctggcagcacggcggtggcagctgctcacgttgaggcgaagacgcttattaccgcacagcctgctgatatcgccggtcccagcgaggcggcgatggagaaccccaaaggcccaagccggtgcagcacctgcagaaagagggttgggctgaccggattcaactgccggtgc

SEQ ID NO: 9765 - DNA, 345 bp, Triticum aestivum
  Clone ID: uC-tsrow189079b05b1
ttgtttctgttgggcgtcgaccaatcactggcctgaggctgtgcttggaaggaacaaaacagaaccgtctggctattcatttgcagcaccttggctcgttaccaaagatatttctacctcactgggactcgcatatcacgatcgggccaccaaaatggcaagggcctgaagagcaggatagccgatggttcgaaccaatcaagtggaagaattttgctcatgtcagcactgcgcccatagagtacaccgaaacaaatatcacggatctgtctggcgtttatattgtcacgggagcacagttaggagtgtgggattttggtgcaaagagcgtgctccaccttaaac

SEQ ID NO: 9766 - DNA, 310 bp, Triticum aestivum
  Clone ID: uC-tsrow189079b06b1
tgttctagatccacaagccagctgaaaggaagaagatgatgagcaacaaggccctcacactcggcgcggtcgtcgtcctcgccttcgccatggcgggcgcgcacgccgagcagtgcggccacgcggccgacggcatggagtgccccaacaacctctgctgcagcgcgtgggggtactgcggcatggacgccaactactgcggcgatggctgccagagcggcgcctgctacgagcccaaacgctgcggcgcccaggccggggcgaacgcggtgacgtgccccaacaaccactgctgcagcggcgacgggtt

SEQ ID NO: 9767 - DNA, 424 bp, Triticum aestivum
  Clone ID: uC-tsrow189079b07b1
tcttttccctccctcggttcatcggcctcccgatcgagcagtagaagcagcgcaagagcaccgctagcactaaagaaatggcggccgagacgttcctcttcacgtccgagtctgtgaacgagggccatcccgacaagctctgtgaccaggtctccgacgccgtcttggatgcctgcttggcccaggatgccgacagcaaggtcgcctgcgagaccgtcaccaagaccaacatggtcatggtcttgggcgagatcaccaccaaggccaccgtcgactatgagaagatcgtgcgcgacacctgccgcaacatcggtttcatctctgatgacgttggtctcgacgccgaccgttgcaaggtgctcgtcaacatcgagcagcagtcccctgacattgcccagggtgttcacggacacttcaccaagcg

SEQ ID NO: 9768 - DNA, 407 bp, Triticum aestivum
  Clone ID: uC-tsrow189079b08b1
tcgtttccctccctcggttcatcggcctcccgatcgagcagtataagcagcgcaagagcaccgctagcactaaagaaatggcggccgagacgttcctcttcacgtccgagtctgtgaacgagggccatcccgacaagctctgtgaccaggtctccgacgccgtcttggatgcctgcttggcccaggatgccgacagcaaggtcgcctgcgagaccgtcaccaagaccaacatggtcatggtcttgggcgagatcaccaccatggccaccgtcgactatgagaagatcgtgcgcgacacctgccgcaacatcggtttcatccctgatgacgttggtctcgacgcccaccgttgcaaggtgctcgtcaacatcgagcagcagtcccctgacattgcccagggtgttcac

SEQ ID NO: 9769 - DNA, 405 bp, Triticum aestivum
  Clone ID: uC-tsrow189079b09b1
tcgtccacgcgtccgattagcagcagtcgctaactccctctgctcatctcgtttcaagcagcaagtgtcaactctcaacaccacctctacaaaagcaatcgtgcactctggtgatgctctctggtttgtgccgccatccctgtcgatgaagacctccgtggcctccttctagtgccccgtgccgatcgccgatgctttggccggaattcttgcaccatgccgccggttcctgacatgctcgtgcggctcctcgtcgcgtccgtgctgctcggcgcagccagtggcgcgtttacccccgcggacacctacctcgtcctctgcggcacgtcggcgagcgccaccgttgccgcgggacggacgttcgttggggacgcccgtctgcccgccaagtcgctggccgcgccg

SEQ ID NO: 9770 - DNA, 350 bp, Triticum aestivum
  Clone ID: uC-tsrow189079b10b1
ttcacgcgtccggggttttgctgcctccctcccccaccgccgacgtcgccgcccgcgtccaccatggcgctgccgaaccagatcaccgtcgattaccccagcttcaagctcgtcatcgtcggcgatggcgggactggcaaaaccacatttgtgaagaggcatctcactggagagtttgagaagaaatacgaacccaccattggtgttgaagctcacccgttggatttcaccactaactgtggaaagatccgtttctactgctgggacactgctgggcaagagaagtttggtggccttagggatggatactatatccatggtcagtgtgcgatcatcatgtttgatgtcac

SEQ ID NO: 9771 - DNA, 353 bp, Triticum aestivum
  Clone ID: uC-tsrow189079b11b1
ttcacgcgtccggctggttcctggaagggaagaatgagtgcaatagtacagatgcgaggatcgatccctctcttttggtcacaagaggctggccgacttagtcctaagcctgatatttttgtgcagaggtatgatcctacttatgaagcaaccaagttacattttgatgatctcgctcagcgatatggacagcctatcataatacttaatttaataaagactgttgaaaaaaggccaagggagatgatgctcaggcgtgaattctttaatgcagttggatatcttaatcagaatgtcccagaagagaggaaactgagattcatacactgggattttcataaatttgcgaaaag

SEQ ID NO: 9772 - DNA, 376 bp, Triticum aestivum
  Clone ID: uC-tsrow189079b12b1
tctttcacgcgtccgggaatctcttgatgagacggatgcacgtcggctggtcatacacaaaatgaagaaggatatttatcagtcagtatcgggtgtacaccgtctccgctctgttatcgcattggacatcaatattccatcatccactctactgcctctaatagcaaagaagtccagatatatgtcggtgctggagttaagtggcctacccattgggaaggttccagatggtattggagatcttttcaatctccgctatctgggtctgcgtggttcaaaagtgaagctccttcccaggtctcttgagaaactctcaagtttgttgacactggacctttcagggtctggcatgaaggagctgcctagaggcattggt

SEQ ID NO: 9773 - DNA, 395 bp, Triticum aestivum
  Clone ID: uC-tsrow189079c01b1
ttctcagatggacggcggcgcgacggccgcggcgctcggcgcgtgggaggctgtgcagggcttcttcacgccggcggctcgggtggtccagccggccgtgctggaggaggaggagcacgacgacgacctcgtagagcacgccgcgaggtcggacaccgagttcactgacaactacaacagcttcacgacaccgccgccggagcaggagccggaggaggagcagtactaccgcgaggagtacgtgcctccatacaggccggcgccgctggcgcgcgcgccgtccgtgctggagcgcctgcgctccttcagcctctaccgcttcaactccggcaacctgttccccgagctctccccctcgccggaccatgccgtggcctccgtcgcggcggcggacg

SEQ ID NO: 9774 - DNA, 419 bp, Triticum aestivum
  Clone ID: uC-tsrow189079c02b1
ctgttttaatgggcgaccaatccaaaatgtgcctgtagcatcatcggttgtgccgcttctggtgtcgggctttcgcagagggtttcctccatccatcatagaaggaaggaacggaacccttggcttgacttctccatggcttctactaattcctagtgtagagcttctaactccggtccattgtaaatattggctgtagttgaggaagctttcggcctcctgtaacccccctcgcgaagatgtcgtcagctggtgtcatagcgcttgctccgatgaccgatgacctcgccttcttgcccatcaggtttgatggaagtcgttcagcacactgcttctccgggtcacagctgcaggattccattctcatcttcctcgctgtgcctggtgcgccaccaatgccgatgagtgtgctgggcact

SEQ ID NO: 9775 - DNA, 472 bp, Triticum aestivum
  Clone ID: uC-tsrow189079c03b1
ctctcttggggggcctggaggtggccgacatggtcgtcgacatcttcttcgccgtcgacatcgtcctcaccttcttcgtcgcctacatcgactccaggacgcagctcctcgtccgcgacaggaggaggataaccttcaggtatctgtcgacgttcttcatcatggacgtggcgtcgacgattccgtaccagggcatagcctacctcgtcaacggcgaggtcagggaaggcatggtgtacagcctgctcggcctgctccggctctggcgtctcaggaaggtcaagcagttcttcacaaggctggagaaggacatcaggttcagctacttctgggtacgctgcgcgcggctcatcgcggtgacgctgttcctggtgcactgcgccgggtgcctgtactacctgctggcggaccggtacccggaccgggacaagacctggatcggcgccgtgatccccaacttccggcaggagag

SEQ ID NO: 9776 - DNA, 394 bp, Triticum aestivum
  Clone ID: uC-tsrow189079c04b1
tttatctccacagacacaccaacaacctcaagacagaggccggaaactgaggcgcaaaggaaggaagcagagcaaagtcttctctccgcctccgcgtcttacgagagaaacaagccttcggttcttcattccaacaggaaatggagaaggcaggacacgagcatgtgatcggcatcccagtgagcagcactgccatcggcatcgaggagcccgagttcaccagcgatggacctaccaatgtccacggtgatgcaaaatactcgacgagcacgcgtaccggcggcaaatcgggcagggcagcggacaaattcgctcgaggaatcagagaacatgtgagtctcggcccaaaactgtacgagaccgtgaggggcaagctgtcgctgggcgcgagaat

SEQ ID NO: 9777 - DNA, 356 bp, Triticum aestivum
  Clone ID: uC-tsrow189079c05b1
ttcctttcgtccgtgttggtgcatccggagctttatttgggctgcttggatctatgctttctgagctacttatgaactggactatttactccaacaaggttgcagccataataactcttctcttcataatcgcgatcaacgtggcaatcgggatactaccgcatgctgataactttgctcatattggtggattcttgaccgggttccttttggggtttgttctgctggcaaggccgcaattcggttggttggaacgcatcgagctgccccacactaatcagccttctaagtacaaaccataccaatatgtcctgtgggttgtggcactcgtcttgctgctcgtcgggttcacgctt

SEQ ID NO: 9778 - DNA, 473 bp, Triticum aestivum
  Clone ID: uC-tsrow189079c07b1
ttctgtgccatcctcctcgaagaactccagtgctcatcttctactcgcccctggcctaatccatccaatctttcggttcagaaggcgaggagggtgcggtgcctggtccagatctcgtggccgccatggcggagcagttcgcggagtcagcgaacaatgtaatcatcgaagaggtgaacaagggcctgaaccctggaatgatagtcctgcttgtggttgcgaccaccctgctgcttttctttgttgggaactatgcgctgtacctgtatgcgcagaagacgctccctccgaagaagaagaagccagtctccaagaagaagctcaagagggaaaagctgaagcaaggggtttttgcaccaggggagtgaagagacccatcgatttctcatgtcgattgctttatgctgggctcctttttttacctgataaaaaatatataccagctggagctgcagtgttgagcgactgtttat

SEQ ID NO: 9779 - DNA, 265 bp, Triticum aestivum
  Clone ID: uC-tsrow189079c08b1
ttaggtatgtggctctgatgacatatggggatgacatcatcatgggtgtgagctgtgctgtgcgcggttttgaccacacagggatgcagatcgaattagccaagatcggcgtggtttacaccatggccgataaggaagcagaatccgttccatttatggatatctcggaggtttacttcttgaagcggacgtgggttatctcgcctgaggtgggatcccatattgcgatattggagcacgattcgatcgataaaggtctcctgta

SEQ ID NO: 9780 - DNA, 257 bp, Triticum aestivum
  Clone ID: uC-tsrow189079c09b1
cggacgcgtgggcttttctcgtgggccctcctcctcccgcacagagcacacacaaggggagcggccatgccacggcgacgagggaaggccatgatggggcgacgtcggagaggtggcaggcggcggcgaagacgaggagcaggaatatcgccgtctcacatctacaccgggaccaacatcgcggtgttgaggcggtggagtggaggcctggggagagttgcctagaagaggaggaggttgccggaggaagaggggaa

SEQ ID NO: 9781 - DNA, 257 bp, Triticum aestivum
  Clone ID: uC-tsrow189079c10b1
cggacgcgtgggctgtctcgtgggccctcctcctcccgcacagagcacacacatggggagcggccatgccacggcgacgagggaaggccatgatggggcgacgtcggagaggtggcaggcggcggcgaagacgaggagcaggaatatcgccgtctcacatctccaccgggaccaacatcgtggtgttgaggcggtggagtggaggcctggggagagttgtctagaagaggaggaggttgccggaggaagaggggaag

SEQ ID NO: 9782 - DNA, 63 bp, Triticum aestivum
  Clone ID: uC-tsrow189079c11b1
tcttccacgcgttcgcctacaccggggaggcgttggcctgcgcccgtggacgtgcccgggaca

SEQ ID NO: 9783 - DNA, 423 bp, Triticum aestivum
  Clone ID: uC-tsrow189079c12b1
tccacgcgtccggagcacacgagtcgacgcggcgcgacagctcagctctttcgtctcgtctcgcctcgcctcgccccgccccgcccccttccagtccctccggcgcgcgcgagcgagatcgatcgccccgggccctagatcccgatggcctcgcgccgccgcaccctcctcaaggtcatcatcctcggcgacagcggggttgggaagacttccttgatgaaccaatatgtgaacaagaagttcagcaaccagtacaaggctacgattggcgccgatttcctcaccaaggaggtgcagttcgaggacaggctcttcaccctacaaatatgggatactgccggtcaggagaggtttcaaagtcttggtgttgcattctaccgcggagcagattgttgtgttctagtttacgatgttaactcgatg

SEQ ID NO: 9784 - DNA, 87 bp, Triticum aestivum
  Clone ID: uC-tsrow189079d01b1
tttttaaaaagaagtctcttctattactgggacaaggtgctgctaaggacactcacatggcgacttccatgagttgcctggtggtgc

SEQ ID NO: 9785 - DNA, 399 bp, Triticum aestivum
  Clone ID: uC-tsrow189079d02b1
ttctcgcgtccgatccagctctgctcagctctgcctctgccgctgcctctgccgcctctcctccacccaccgagtgaaagagctctccatccgacgaaagatcgaccatggcgggcacggccaactgcatcgacatcatcctcgccatcatcctcccgcccctcggcgtcttcctcaagttcggctgcgggcatgagttctggatctgcctcctgctcaccttcctcgggtacatccctggtatcatctacgccatctacgccatcaccaagtaaaatcgggccgtcccaaagcgttccgcgatgtaatattttcaggatgatgatctcgtctgtctagcccctccatgccttcgtgggttcttttgattcttttccgtgtgcgttgatgatgcgaatt

SEQ ID NO: 9786 - DNA, 429 bp, Triticum aestivum
  Clone ID: uC-tsrow189079d03b1
tttgtcaagtatgacattggagcgggctttggacattttgccatcgcaaatgaggatgtgtacaagctgtctgagacaattaaatcatctgattgttgtaagatcactcgtgaacctggtcctgtcaagggagggtccactgtgattgcctttgcacaagacccagatggttacatgtttgagcttatccagaggggtccgacgcctgagcctctctgtcaagttatgcttcgtgttggtgaccttgatcgggctatcatgttctacgagaaggcccttgggatgaagcttctgaggaagaaggatgtgcctcagtataagtacactattgccatgatgggctatgctgaggaggacaagaccactgttctggagttgacatacaactatggtgtcacggaatataacaagggcaatgcatatgctcag

SEQ ID NO: 9787 - DNA, 153 bp, Triticum aestivum
  Clone ID: uC-tsrow189079d04b1
ttttgtcatgtatgacattggagcggtctttggacattttgccatcgcacatgaggatgtgcccaagctgtctgagacacttaaatgatatgaccgttgtaagatcactcgcgatcctggtcctgtcaagggagggtccactgtgattgcctt

SEQ ID NO: 9788 - DNA, 344 bp, Triticum aestivum
  Clone ID: uC-tsrow189079d07b1
ttaagaaggtataatttcaggccctcgagctgggctctggaaggaagcagacgcattccatagccttcttttctcggatacatgtaaaagcttacttcatgtattcttatctcagcgtgcaacatcaaaggttcctggtgctacagacttgggtttgatgcctaggaaaataactaaagtcgccattctaggtggtgggcttatgggttgtggaatcgctactgcaatgatactgagtaactatcctgtgctactgaaagatgtatacgagaaattcctgaatgctggaattgacaggatcaaagccaatttgcagagccgtgtgaggaaaggaaaaatgacag

SEQ ID NO: 9789 - DNA, 376 bp, Triticum aestivum
  Clone ID: uC-tsrow189079d08b1
ttcgatgtgtttggcaccaaacgatgtacatgagatccagatccaatttgctcttgaaagggggatccctgcttatcttgctgttttgggaacaaaaaggctttcataccccaatagatcgtctgaattagcccactgttctagttgcaggattgattggcttcagagagatggaattgttatgcttgaactggacagattactcaggcctggaggttattctgcttattcatctactgaggcatacgcacaggatgaggaggatcgcaaaatctggaaagaaacgagttccctcgcagaaaggatgtgctggaaaattgcagagaaaaaaaaccagacagctatttggatcaagcctatgaacaatgattgctac

SEQ ID NO: 9790 - DNA, 403 bp, Triticum aestivum
  Clone ID: uC-tsrow189079d09b1
tctggcgccggcggtgaaggtgtacgggtgggccgtgtcgccgttcgtggcgcgcccactgctgtgcctggaggaggccggcgtcgagtacgagctcgtgtccatgagccgcgcggccggcgaccaccgccagccggacttcctcgcccggaaccccttcggccaggtccccgtcctcgaggacggcgacctcaccctcttcgagtcgcgcgcgatcgcgaggcacgtgctccggaagcacaagccggagctgctgggctgcggctcgccggaggcggtggcgatggtggacgtgtggctggaggtggaggcccaccagtacaaccccgtggccagcgccatcgtggtgcagtgcatcatcttgccgctactgggcggcgcgcgggaccaggcggtggtggac

SEQ ID NO: 9791 - DNA, 306 bp, Triticum aestivum
  Clone ID: uC-tsrow189079d11b1
tttctttaagatggcgccacagctgtggacgacgaaaaggaacaggataatgagatgactcttgatgaatttgagaaagtaatggaggagaagaggcaagcactcgctgcttcgaagaagtctgaagagaggaaggtcgaaattgataaggatctgcaggctatgcaactactttccaccaagaaaggaaatgatgaagttttcatcaaactggttgctgataaggaggctttgaagaagaaagagaatgctgaacgtgaagagcgtgctaagaagtctgtgagcatcaatgagttcctgaagcct

SEQ ID NO: 9792 - DNA, 240 bp, Triticum aestivum
  Clone ID: uC-tsrow189079d12b1
tctttcagatggcgccacagctgtggaagacgaaaaggaagaggataatgagatgactcttgatgaacttgacaaggcaatggcggagacgaggaaagcacttgctggtttgaagaagtctgaaaagaggaaggttgatattgatatggatctgcaggctatgcaactactttccaccaagaaaggaaaggatgaagttttcatcaaactgggtgctgataaggaggctttgaaaacaaa

SEQ ID NO: 9793 - DNA, 225 bp, Triticum aestivum
  Clone ID: uC-tsrow189079e05b1
gatcaagctcccctctggtgccaagaagattgtcccaagcagctgccgtgccatgattggtccggttgctggtggtggcaggactgataagccaatgctcaaggctggtaacgcctaccacaagtaccgggtgaagaggaactcctggcctaaggtgcgtggtgtggccatgaaccctgtggagcatccccactgaggaggtaaccaccagcatattggtcacgc

SEQ ID NO: 9794 - DNA, 286 bp, Triticum aestivum
  Clone ID: uC-tsrow189079e07b1
tccacgcgtccggcgagagatcgcatgaatggtgtgtatccagaggacctcagttgtttatagaaatatgtaggttatctacggtggttgtttcgcgatcattttgctatattgatcagtctgatgctctctgggcccgtgagattttgctgccacagatcagttgatcttggttctgaactctgctgttgcaacttgtaagtcttccatcaaactggcaatgtatcattttcacccattggtgtattatatttcttgcattctttttgacctcatgagacccatg

SEQ ID NO: 9795 - DNA, 367 bp, Triticum aestivum
  Clone ID: uC-tsrow189079e08b1
cagacaaagtcttccaaatttatagcgatccaagaatagtaatagggatacaaaccacatacaaataatattacaagcaaaaaagtagaagaacgttaataagcaggaatagccagtaccagtctaaatacttttattaactgtacacttctgtttctggttttattttttccaataccttctcagcatcaataaagccccctaaggggcccaacggtgtatattttacttgcctccaactgggtataaatggcagtgccaggcagtgaagatggaggtgatcaatactattaaatggtggctgatgaaaaccaaatctatgttcctcagatttgggagcatctcgactgagtaaatcttttcccac

SEQ ID NO: 9796 - DNA, 419 bp, Triticum aestivum
  Clone ID: uC-tsrow189079e09b1
tctgtacgaatgagctccatatgctccccttggtcatgctcgtcctcctgatatcgaagaccatagccgattgcttcaacaaaggtgtgtatgaccagatcgtggtgatgaaaggcttgccattcatggaggctcatgctgaaccgtacatgaggcacttggtagctagtgatgttgtgtctgggccactcatctccttttcgggtgttgagaaggtgggcaacatcgttcatgcgttaaggatcaccggccacaacgggtttccggtggtcgatgagccgcctgtatcagaagctccggagctggttgggctggtgcttaggtcacatgtgttggttcttctgagtggaaggaacttcatgaaggagaaggtgaaaacaagtggtagctctgtgctcagaaagtttggtgcatttgac

SEQ ID NO: 9797 - DNA, 342 bp, Triticum aestivum
  Clone ID: uC-tsrow189079e11b1
tcttattattggaggaacagatatgttccccctggtgacaaatggacatgttcaggactccctgatacttcctgaagtcgagaggcccacggaaccaaacgccgagaactttgttgcccccgcgagccagatttggatcagtgcagcgtctcgcgaaccttcacagagtggatcatctaatgccctgacggctcaatcagccggttttgaagtatgtgatgagctacgtcctatggggcaatcattgtctatgtgtgagagcactaggaaaaatgttgcacatggaacagctgactgcagatcaaacggcaaagattacagagagaaggtactaaaagataa

SEQ ID NO: 9798 - DNA, 355 bp, Triticum aestivum
  Clone ID: uC-tsrow189079e12b1
tttctttttattggaggaacagatatgttccccctggtgacaaatggacatgttcaggactccctgatacttcctgaagtcgagaggcccacggaaccaaacgccgagaactttgttgcccccgcgagccagatttggatcagtgcagcgtctcgcgaaccttcacagagtggatcatctaatgccctgacggctcaatcagccggttttgaagtatgtgatgagctacgtcctatggggcaatcattgtctatgtgtgagagcactaggaaaaatgttgcaaatggaacagctgactgcagatcaaacggcaaagattacagagagaaggttctaaaagataatttgaaggatg

SEQ ID NO: 9799 - DNA, 418 bp, Triticum aestivum
  Clone ID: uC-tsrow189079f04b1
ttttggttcggcaccgaaatggcattccacgacgaggcgccgctgctgctcaggatcaacaccgccagaggcggccacatgggcggaggcgagtgcgacgaggcggagaaccagcggtggccgccgtggctcaagccgctgctggcgaccagcttcttcgggcaatgcaagatgcacgccgacgcccacaagtgcgagtgcaacatgtactgcctcgactgcgtcaacggcgcgctctgctcccagtgcctcgcctaccaccacggccaccacgccatccagataaggaggtcctcgtaccacgacgtgatccgcgtgtcggagatccagaaggtgctggacatcaccggcgtgcagacctacatcatcaacagcgcgcgcgtggtgttcctcaacgagcgcccgcagcccaggcccg

SEQ ID NO: 9800 - DNA, 393 bp, Triticum aestivum
  Clone ID: uC-tsrow189079f05b1
ttattaccaccgcaacagggagtactacctgccgtcgcccaccgacgtcgtcggtcaccacggcgatgccgccgacaacatcgtcatccataaggcgcacttctccaaggacttcatcgccggtctccgagtcaaggcgtcagaagggcgcggccggccgttcagccggttcgagaccatcctcgcccacctctggcgcaccatgacgcgcgcgcgcgacctgagccccgaggagaccaccaagatccggctgtccgtggacgggcgacaccggctcggccagccggcggagtacttcggcaacatggtgctttgggcattcccgcgctccaccgtgggtgacctcctgaaccggccgctgaagcacgcggctcatgtgatccatgacgaggt

SEQ ID NO: 9801 - DNA, 372 bp, Triticum aestivum
  Clone ID: uC-tsrow189079f06b1
cagggagtactacctgccgtcgcccaccgacgtcgtcggtcaccacggcgatgccgccgacaacatcgtcatccataaggcgcacttctccaaggacttcatcgccggtctccgagtcaaggcgtcagaagggcgcggccggccgttcagccggttcgagaccatcctcgcccacctgtggcgcaccatgactcgcgcgcgcgacctgagccccgaggagaccaccaagatccggctgtccgtggacgggcgacaccggctcggccagccggcggagtacttcggcaacatggtgctttgggcattcccgcgctccaccgtgggtgacctcctgaaccggccgttgaagcacgcggctcatgtgatccatga

SEQ ID NO: 9802 - DNA, 211 bp, Triticum aestivum
  Clone ID: uC-tsrow189079f08b1
ttttcttcgttatgccatggtgtggcctctccagtcgggatacctgctgctagaccttgtgagcagagtctggtggcggtcgtagttgacttctacctcgccttcatggtggaggggactggtggacattggatctggcagtatccctaccaataagctcagtctgtccagcatctaggagccacggtggttccttcctctgtttcttgcc

SEQ ID NO: 9803 - DNA, 311 bp, Triticum aestivum
  Clone ID: uC-tsrow189079f11b1
tcgtcagctgctgacccccacaggggctcgggagtggacattggcgaaaggagtcatgaggaactgtcgcccttgcatgaatacatacgtactgtgaacaccggccttgccgacaaagcgagttgaggttgtgtgaaagaaggggtccggtgcagatctgatgaggagcaagacaaggaagatgatgggcgctgtctagtctgcctggaggagtacaaagacaatgatctcctagggatactgaagtgcaagcacgacttccacaccgactgcatcaagaagtggttgcaagtgatgaacgcatgcccggt

SEQ ID NO: 9804 - DNA, 345 bp, Triticum aestivum
  Clone ID: uC-tsrow189079f12b1
ttcttcacgcgtccggatgctgttcaaactcttgacgatgcacttcatctgttttccacccctgaatctttggaaggatacagaacaactgctggaaaggccggagtggtgacagctaggaaatcattcaagatacacgaactttcaaagataatgatactgcacttgaagaggttcagttatggaaatcgtgggtgtactaaactgtacaagccactccacttccctcttgaactggtcctcaatcgggatctgctgagctcaccatcatcagagggtagaagatacgagcttgttgcaaccatcactcatcacgggagcggcccgttcaggggccattacact

SEQ ID NO: 9805 - DNA, 388 bp, Triticum aestivum
  Clone ID: uC-tsrow189079g01b1
ttctcttcgtccgcccacgcgtccgcccacgcgtccgcccacgcgtccgcaggcgagcagcgaccaccttccggcgagggtagcagcgatggagggcaaggaggaggacgtgcggctcggagcgaacaagtactcggagcggcagcccatcggcacggcggcgcaggggtccgaggacaaggactacaaggagcccccgccggcgccgctgttcgagcccggcgagctcaagtcctggtccttctaccgcgccggcatcgccgagttcatggccaccttcctcttcctctacgtcaccatcctcaccgtgatgggctacagcggcgccacctccaagtgcgccaccgtcggcatccagggcatcgcctggtccttcggcggcatgatc

SEQ ID NO: 9806 - DNA, 381 bp, Triticum aestivum
  Clone ID: uC-tsrow189079g02b1
tccttttctaaccgatcagaccgtccctctcgccgctgccgtccccgtctctctctctcttctctctctccggccaaatcaatccacccgccggcggcgagcacagagacagaggggtaggagccgacagccaaggcagtccaccaccgcgccatggcgccgcccccgaccactagcgcccccgacggcggcctggatcccagggacgtgtgcgtcgtcggcgtcgcccgcacgcccatcggcgccctgctcggctccctctcctccctccccgccaccaggctcggctccgtcgccatccagggcgctctccggcgagccagcgtcgacccggcgctggtgcaggaggtgttcatgggcaacgtcctcagcgccaacctc

SEQ ID NO: 9807 - DNA, 435 bp, Triticum aestivum
  Clone ID: uC-tsrow189079g03b1
ttctctcgtccggcttcctctgcgacttcggggacgccatggtcaggatgggcaacatcgcccccctcaccggctccgccggccagatccgcatgaaatgcagcgccgccaactgagccggcgccactgcatctagcttgccggcgaagaagacagatgctgcatgcacctgaccttggtgcatgcccatctcgcgttgtcaacagtcatcatatcgtgcgtctggatgcgtacgtgtacgtgtacgttcgtgtgaaggttgtcctgtgtaccgtttcgtcgggttcaagctagctaggattctccagccaggagtaataagctggctcgtacagtgtgtcggttgacgggtgagtgagtggcactgtggtagtgcctatcagggctgcgtgatagtagcgcacaaaatgaataatggaatgtgtagctagccgc

SEQ ID NO: 9808 - DNA, 93 bp, Triticum aestivum
  Clone ID: uC-tsrow189079g04b1
ttcttgcccgagatacaggctacggtggcggcgccggtgacggggaagatgttcaagggcctgtgcctgtgctacgcggtggtggtgaccacc

SEQ ID NO: 9809 - DNA, 491 bp, Triticum aestivum
  Clone ID: uC-tsrow189079g05b1
ttttcgtcctcacccagcgaagaaatgggatcatattggggctataaagtccgctatgcttcaaatttaagtggtgttatcaatgattcaccatacaaggaaggatatgatcatatcattggcacttcagagcatggcgaaaccattatttcatctgagctaatcttaccttcattcaggcaccttttaattgcgtttggtggactggctggtctggaagaaagcatcgaagaggacccaaatctgaatggcaaaggtgcaaatgatgtattcccatcttatttgaatacatgccccaaccaaggtagcagaacaataaggacagaggaggcacttctcatatcccttcaatacttccaagaccccatcaggcgagctgggatggcgagttagagggttttatgcgacacatgcaaatacaacattgcacttacccaaggattggttttaacgcttggaacagacatggaatgctgggtggtcatgtcatg

SEQ ID NO: 9810 - DNA, 371 bp, Triticum aestivum
  Clone ID: uC-tsrow189079g06b1
tgtctttaccattcaggagcagcttttgcttgaaagagatccccatggcaatgttcaggttgcgaaaattgaaactgagaaaatgcttattgccatggttgaaactgaattggagaagagaagagcggcggggaagtactctgcacatttcagaggccagtctcacttcttcggatatgaaggaaggtgcggcctccctaccaattttgattccagctattgctatgcattaggctatggtgctggtgctcttctccaatttggcaagacaggacttatttcgtcggttggtaacctggctgctcctgtggaagaatggactgttggaggaactgcactgactgcgttgatggatgttgagaggaggcatg

SEQ ID NO: 9811 - DNA, 321 bp, Triticum aestivum
  Clone ID: uC-tsrow189079g07b1
tcgtcaaagcctagctaagaccaaaaatcttcactggcaatccactagatacaaaataatagcacaaacagctatggctaagtcaaatgcattggctgcaacactgttgcttgatatggtggtgtccctcgccacactagagggtgttcatggcgtctgcggcatgtcgaatgatgaattcaagctttgccagcccgcggcggcagtgaataacccgacagagagtccgtcgggtgagtgttgtgctgcgcttgggaaggccaatctatcatgcatttgccgctacaaaggcatcgccggcatatggctgaaaatgtacca

SEQ ID NO: 9812 - DNA, 379 bp, Triticum aestivum
  Clone ID: uC-tsrow189079g08b1
tcgttccgaaccgccaaagcgtcactctcgacatccctcggttccttcacccttccctcttcggcttctcaccgagtaattttggcagccggctcgatccctccaaggccgcagagactcgatactttgttgaacgatcggtggctggtgttgcgtttgtgagtggtgtacgattcttcgttgtgccatgaggaatcacaagaagttgctgcagttcctgcggccggacccggcggtggcggcggccaacgacgacaggtgctccccgctgccttcgcccacgaccagcgggagcgcgagcacgtcggccacggcgtccccgtcgccgtacgtcgcgtcgtcgtgggtcaacctcccggggctcggcgccggggcggcg

SEQ ID NO: 9813 - DNA, 206 bp, Triticum aestivum
  Clone ID: uC-tsrow189079g09b1
cacgcgtgcgtttccatatggactttgatctcatcttatagtccgttgacaaggccaaaatcttgtttgaagagggtggtgattgggtgaggaagaacagattgaaagtgtacgaaggcttgtactgtatggccgcttgaaatttcaagaaggctactagcttatttttggattccggttcaactttcacaacttatgagttgttc

SEQ ID NO: 9814 - DNA, 240 bp, Triticum aestivum
  Clone ID: uC-tsrow189079g10b1
ccctcatacctacctgcaggttccaagagagagggccgtttgagagagagagagagacatgggttgcttgggatcggaggtcgaccatggcggctgggagatgttccatggtcacgccgaccccgtcgtctatgagctcaacaagctggtgaatctcctcagagaaaaggaacgagaactaggacacgcatacagtgaaataaaaggtctgaaggtgacagaagctctgaaggacaaggc

SEQ ID NO: 9815 - DNA, 371 bp, Triticum aestivum
  Clone ID: uC-tsrow189079g11b1
gaccttatatccaatgtacacttatcccaaaaactttacggaagtggaagaaaataccatttatagttcagagaaacttcagaacctatggtggaccttcaggcctttagagaagaccctgggggacagcgtggaatcctacaaagcatctggcgtgctgaactgagcattcaaccagggaaagtttggctgttaatgcttgcaaactccttgcggttcatgtaagcagtgaaacaaaataagttggtgacacaatcgtaacgagagtctgtgtgaacatgaacaaagcatgaatcgtatgcgcgcctttcttttggtgtgtcttgacttgaggtgtatgcgcacctttcttttggtgtgtcttgacttga

SEQ ID NO: 9816 - DNA, 396 bp, Triticum aestivum
  Clone ID: uC-tsrow189079g12b1
tttttgagctccctcatgttgagaggtacttctgggccatggttaaccagcctaacttcaagaaggtcattggcgatttcaagcaggcagaggttgtacctcctgttcagaagaaggctgctcctgctaaaccaaaggaggccaagaaagaggctcccaaggcggccccaaagccagcagaggttgaggcaccagaggaagaggcaccaaagccaaagcccaaaaatccccttgatctactgccaccaagcaagatggtacttgatgactggaagaggctatactcaaacactaagagcaacttccatgatgttgctgttaaaggtttctgggagatgtatgacccagagggctactctctctggttctgtgactacaagtaccaggaagagaaca

SEQ ID NO: 9817 - DNA, 268 bp, Triticum aestivum
  Clone ID: uC-tsrow189079h02b1
gggggccacgggatcgtcggcgcccatgtgcccctcggctgcggcctctccttcgcgcaaaagtacaggaaggaggacaccgtctccttctcgctctacggcgatggcgccgactaccagggacagttctttgaggcgctcaacatctcgagcctctggaagctgcccgccataccgggctgagagaacaaccattatgggatgggaacggcggagtggagggcggtcaagagccccttctactacaagcgtggcgactatgtgcctg

SEQ ID NO: 9818 - DNA, 291 bp, Triticum aestivum
  Clone ID: uC-tsrow189079h03b1
tttctttggagcccggggagcaggcgcagcgttcgttcttgcagggagagtgggtcgagcgatcggtcgggagggtggcatgagcccggggagcgggaagctgcggtggctgtggagggcgccggcgcgggcgttcggccgcgcgcgggacttctacgtgcggagcatcacggggtgcgcgcgctacgtcccggtcgacgcggccttaggcgcctatccggtgctcgtgcccgcgccgctgtccaggagccagagctgcggctccggcgccgactatggcggcgaggagga

SEQ ID NO: 9819 - DNA, 363 bp, Triticum aestivum
  Clone ID: uC-tsrow189079h07b1
tctttccgaaccgacaaagcgtcactctcgacatccctcggttccttcacccttccctcttcggcttctcaccgagtaattttggcagccggctcgatccctccaaggccgcagagactcgatactatgatgaacgatcggtggctggtgttgcgtttgcgagtggtgtacgattcttcgttgtgccatgaggaatcacaagaagttgctgcagttcctgcggccggacccggcggtggcggcggccaacgacgacgggtgctccccgctgccttcgcccacgaccagcgggagcgcgagcacgtctgccactgcgttcccgtcgccgtacgtcgcgtcgtcgtgggtcaacctcccggggct

SEQ ID NO: 9820 - DNA, 244 bp, Triticum aestivum
  Clone ID: uC-tsrow189079h08b1
ccccctccacctcctacccagcgtgggctcccgttcggaaccccaagctcccccgccgccggctaaatggccccgaatcgaggcggcaaggccccggtgccggcgaagaagaaggcggcggacaaggtggtgaacccgctgttcgagaagaggccgaagcagttcggcatcggcggggcgctgccgcccaagaaggacctccaccggttcgtcaagtggcccaaggtcgtccgcattcagcgcc

SEQ ID NO: 9821 - DNA, 180 bp, Triticum aestivum
  Clone ID: uC-tsrow189079h10b1
tcgcacacaagaagctcatagccattcaaaggctctccatctccgaagctccaacccaacctcgaagatgtcttgctgcggaggaaactgcggctgcagcaccgcctgcaagtgcggaaacggctgcggcggctgcaacatgtaccccgaggttgaggccgccggcgccaccctcctcgt

SEQ ID NO: 9822 - DNA, 438 bp, Triticum aestivum
  Clone ID: uC-tsrow189079h11b1
tctagatgaccgtcgcctccgcctggatccacctccttgccgtcgacctctttgctgcaagacaagtgtaccatgatggaatcaagaacaacatcgagaccaggcattcggtttcgctgtgcctgctcttctgccccatcgggatcgccgctcacgcgctgaccaaggtactcgcgggttccacaggtcgatcacactgacgaccgattgcctgtaggcaggctccccttgtttagatgtctcagatcgtgaggttcagatatatgaataaaattgatttggtgcaccatttgttctatatagatttcacattgattgttcccacccattctattggaattggctcaggaaactgaatctactcgccatcatgggttcatagaagggctagtagaacaggttatttgtaccatcgagtcatgacaccaagaaatgtac

SEQ ID NO: 9823 - DNA, 317 bp, Triticum aestivum
  Clone ID: uC-tsrow189080a07b1
tctttctatgatccctctacacctggaaagggcgggtcctttagattccctggggtatacaccacataaaaatcattctcaggaggaccaaatcacccgacccaagccaaaaccaaaacaaataccatcacacagtcagccagccagacaagccagggagcaaaaaaatcccccccaccctccctgcaatagcaaacacgcggaaaaaaatggaggcatgaacacgccctcctactactcctccctctcctgcgtccccggctacccctatcccgtcgacagcccatgggccccgcccccctgctccctgcgggaac

SEQ ID NO: 9824 - DNA, 385 bp, Triticum aestivum
  Clone ID: uC-tsrow189080a08b1
tttttagctcacccacatactccgggtgcgggggagaactgtaagtggaatggggggcacgcggatctctagtcatgaagtgtgggcgcacctgacgactcccactgcagatgcaactcacgagatttccacagagctccaggccaatcctcacctgatcatatgaaactacagcaacggaaaccttgttgcatgcccgcttgcacacatgacgggaggaacacattgtaccattgctcacgcgcttgaaaaaaccaagtaccccaactctgacctctactggaagaagtctgaggaccactaccacttgtcatgccagttcactaccgatctgattgcgacgaaccatgctgacttcatcatcacatgcaccttccaagagatt

SEQ ID NO: 9825 - DNA, 359 bp, Triticum aestivum
  Clone ID: uC-tsrow189080a09b1
ttttcgcgagtctctttctttcccctttctggggggcgttgctgtaacttggggggtgctaatgacgttaaattcggccctcctcttcctctctcctccgccggcgctgccggccggagtggggaaggaaggggagtgtgtccgcttgttgttgtgtttgttgtttcgtttcttcttttcccttttcgcagtggagatgggtgcttggagcttgcaagtggtggccagcgcctgatggcggtgctctcctcgtctgaggcgctccagaggacggagccaggggaggttgggctaatcgtcggctccaccatctgaataaacttgcccggttcccggatctgcaggaggaaccccggttt

SEQ ID NO: 9826 - DNA, 229 bp, Triticum aestivum
  Clone ID: uC-tsrow189080a10b1
atccccgaccagtccgctattaccaaggataacgtggtcatccagatcgacggcgtcctctacctcaagattgttgatccttaccgtgcttcatatggcgtggagaatcccatttttgcagtcattcaacttgcgcatacaactatgacaagtgagcttggaaagataaccttggacaagacttttgaagagagagacacattgaatgagaagattgtgaggtccataa

SEQ ID NO: 9827 - DNA, 375 bp, Triticum aestivum
  Clone ID: uC-tsrow189080b03b1
ttattcatccctctcctgacgccgtacaaggggggccatttcgatctcgccggcagggtggtgatggcgccgttgacaaggcagcgctcctacgggaacgtgccacagccgcacgccgccgtgtactacggtcagcgcgccaccgtcgccggcctgctcatcgccgaggccacaggggtctcggacacggcacagggctacactgacaccccggggatatggaccgcagagcacgtcgaggcgtggaagcccatagttgccgtcgtgcacgccaagggcgcgctcttcttctgccagatctggcatgttggacgtgtgtgcaccttcgagctgcagcccggtggcgcctccccgctgtcgagcacggagaagggg

SEQ ID NO: 9828 - DNA, 328 bp, Triticum aestivum
  Clone ID: uC-tsrow189080b06b1
cgttctcttgggcttacattcatcgatttctcatgagggtttattttagcattgagtcgggtgaatcctttcgatcttaaagagatttttatattccactgacatttttgtttgagattcgtgagtgaatcgagaatggttgatctagattctagaagctgatgaaaaagattagaacggtcaataactcctaccccaaattttggttgaagctagacttggttgatagagtaaagaaggtacgacttcaacatcaaggtgttcccgggcgaacaatatgctagtcactggtcagtgcaatttaattttagaatcatggtgagcttat

SEQ ID NO: 9829 - DNA, 378 bp, Triticum aestivum
  Clone ID: uC-tsrow189080b08b1
tcggtacatatatcctatgttcctcccccgcagacgatagacaggcctggccggcgcagcctgcgacgttcgagctcccgacgcgcgtccacgcgtcgtctacggccatggggttccccctggtgtgctactgcgttgccatccccaagccggtcatggccttctgcaagctcgtcgccgccgtcagggacgccttcctcctgctgctctccctcgtgggactctgccgctccccgcgccgatccgtggacgacgccccgctgcccgaggaggtcaaggagcgcctcccggccgtcgagttctccttgctggcgcgtccggcaaagcaggggtgccacgacggggacgactacatcgccgccgcggcggccacgtgca

SEQ ID NO: 9830 - DNA, 402 bp, Triticum aestivum
  Clone ID: uC-tsrow189080b09b1
cttcgacgggccggcctccgacgacggcgggtgcctcgcgttcgacgaggccctgctgcccgcggagccgctcgccgccgacgagcaggtcgaccccgacgacgtggtggccctcccctactcgtccggcaccacggggctgcccaagggcgtcatgctcacccaccgcagcctcgtcaccagcgtcgcgcagcaggtggacggggagaacccgaacttgtatttcggcccgaatgacgtgctgctgtgcgtgctgccgctgttccacatctactcgctcaactcggtgctgctggcggggctgcgcgccgggtgcgcgatcgtgatcatgcgcaagttcgaccacggcgcgctggtgcgcctggtgcgcgcgcacgcggtcaccgtggcgcccttcgtgcc

SEQ ID NO: 9831 - DNA, 356 bp, Triticum aestivum
  Clone ID: uC-tsrow189080b11b1
ttgtcattgtcaaggtcagcgaggtcgagcttgagtttttgactggcatcaactcggtggaggatgatgttgccatgaagctgtggcgccctacctttaagctcatgcttgtcactcttggagatcaaggatgcaagtactataccaaggatttccgtggaactgtcccatcctacaaggtacagcaagttgatacgacaggtgctggtgatgcatttattggttctctgctccgaaaaattgtccaagatccatcggcattgcaagataaaacaaagcttgagggggcgatcaaatttgccaatgcatgtggagcaatcacccgcacgaagaaaggggcaatcccttcattgccc

SEQ ID NO: 9832 - DNA, 405 bp, Triticum aestivum
  Clone ID: uC-tsrow189080c03b1
ctttctcgtgggcggcggctatgcccgcgccgggggcgctagccctcgcggggggcctgctgctcgccgccgcgtccatctgcgcggaggccgtgtggctcgacatgccgcagaccgggaccaagagcgtgtcggaggagatccaggccaacgtggtggtgctcgccgactacgccctcatgtacgagtgccacccctccgcccaccccaccatcgccgtcaagggtacttcaccatatgggtacaccttacatgaaagtggaaacattacagttggtcaatttgcattcacaacctcggaagctggaaacttccttgcctgcttctggatagatagtgcacagaaaggatcaggcgtatctgtaaatcttgattggaagactggaattgcaacaaaggattggg

SEQ ID NO: 9833 - DNA, 370 bp, Triticum aestivum
  Clone ID: uC-tsrow189080c04b1
ttttctctcctgctgcccgttgctcgccgccgtccggcttcgtcttcgcgcacccaggatagatggcgtcccacattgtttgatacccgcgcatgggccccaagagggagctcaagtttgccctggagtctttctgggatggcacgagcagcgccgaggatttggagaaggttgccaccgacctcagggccagcatctggaagcagatggctgatgctgggatcaagtacatacccagcaacaccttcttctactatgatcaggatcttgacaccaccgccatgctctgtgccgtcccagaccgttactcatggaccggcggggtgatcaatttgagcacctacttctcgatggctaggggcaacgccac

SEQ ID NO: 9834 - DNA, 374 bp, Triticum aestivum
  Clone ID: uC-tsrow189080c05b1
ttactcgtccgcccacgcgtccgaccaagcatctggtttggctttgctttcctcctgcatggctcattacagaagagggagctgggcactttgacccagagatggaacttgaggaccattggctacatgctggttttctgtgttccggtgttcttcgctcaggcccttcttgcgcttgttgggcctacatttgctaaggatgagaacagcgcacatggaaggagagtgcttgctcaatacttcattcagacgtgcatgccagttggggacaccaatgttcgcacctattcgttgtttggcaccatttttctgggacttatcgatgccctcctgatgagctatgtctcctatgttggatctcgggtgttatcctt

SEQ ID NO: 9835 - DNA, 213 bp, Triticum aestivum
  Clone ID: uC-tsrow189080c06b1
ttatttggcggttgacggcgacgttaggaaggggggatctttcagagtggcctggggaagagataccttttctggttaacggcctgccaaccctggaaacggttcagccggaggtagggcctcacaggccggaagagcaccgcacgtcgcgcggtgttcggtgcgcccccggcgggccatgaaaatcctgaggaccgagtaccgttcacgccc

SEQ ID NO: 9836 - DNA, 423 bp, Triticum aestivum
  Clone ID: uC-tsrow189080c07b1
tccacgcgtccgtctccctctctttcccctgcctccttctccagcaaaggccgccgccacggccaggccggcgtggggcgcgccaccggctccacttcgccgccgcacctccgcactccatccatccattcgctgcaccgcgacccatccaccataactaccacgagtcccttgctgcacctcatgccaccaatctgaatctcttcttccttcttgctgctgttcatcccaatctcgctgctgttcatctttgctactgcccgcagctctcttcgtctctctcaaacttgttgatgcagatgccctcaacctcctgctgctcctctcttcttacgcccctgctgttgccccttctacccctacctcgctgctgctctgcttctttttcatccccacgctgctgctactccttctctctacgcc

SEQ ID NO: 9837 - DNA, 395 bp, Triticum aestivum
  Clone ID: uC-tsrow189080c10b1
tcccacgcgtccgacgacacgtttctttctctggccctctccctctccctctccctctcccctcggctagcaaggcgtctctctcttctccagggaggctctcgatttgcatggacaagggccacctcggtggcggcggaggaggaggaggactgctcgccctggacgcctcgccgcggcagctcggcttcctgaacttgctatcaccggcgccgttccacaggagcatggaggcggacgacggcggcggcggcggcggcggcagggggaggaggtccatcgaggttgacttcttctccgacgagaagaagaacatgaagaagagccgcgcatcggccggtgctgacgcggaggaccacaaggatcaggcctccgccgccggactcgccatcaag

SEQ ID NO: 9838 - DNA, 454 bp, Triticum aestivum
  Clone ID: uC-tsrow189080c11b1
ttgttgcctcaatggtttcaaatgtccctgtggtgggggacttcgcacgagctactgaaatgggagctcgagcgataggaggtatagccaaactttttggttattccaatccaccaatgattgacgatgtccaacctatgcagaataaggcattccatgcatttgcaaatgttgagacgcgcgttcccatagacaaactttgtctggatcccaaaaatgaagtttccatttcgcctgctattgcgggcgttgatgaggaagatcctttggtgatttcagatctctgttgtcgagaaagctatatcaatgctttcaattggacaggagcacaggctgtcgataccctcctttggagtgcagtggtaaatccacattacgcttttctatctgggggttttcgaactatgccacccgtcacgtatttgacacccaacttccgtttttggaggggatc

SEQ ID NO: 9839 - DNA, 252 bp, Triticum aestivum
  Clone ID: uC-tsrow189080d02b1
ttttgctcaaccccgcgggggggccgtcgtggggggtctgtcggctcaagagggcgcggtagctcgacttcgacctggagatgctcgcgctggaccagtaccagcagaagctgctcgacaaggtgtccaacaacgcgcactcgccgagggcaagctggggcgcgcccaacggcggcctcggctcgccgcacgccgccgggtcgcccgccagaaacatgccggactacaccgacctgctcggctccatggacc

SEQ ID NO: 9840 - DNA, 359 bp, Triticum aestivum
  Clone ID: uC-tsrow189080d04b1
gttttcctgctttacttgattgggaagtcacggaggagatattgaaactaaaggcagagcttgcagaagcttcaagtaatccggaagctttccttttggatgctcttcattccagtggctattctggtgccttggcaaacccattgattgcctcagaggcttcagttagcagattaaatacagatgttctggaagaatttcttgctttgaactacacttgcacgcgaattgttctagctgcgtctggtgtggaccatgatgaacttgtatcaattgctgaaccactcctgtctgacattcccactgcatctggaacaggaaagccaaaatccgtctatgttggtggagaatatagacgg

SEQ ID NO: 9841 - DNA, 294 bp, Triticum aestivum
  Clone ID: uC-tsrow189080d05b1
ttgtttcaagccaagaaccaatacttgatctgttggttcctttagctcccggtagacttttagctgcaccgatcgatctcgatcatggaggatgagaggagcacccagtcgtaccagggaggtgaggccgccgagcaggtggaggcgacggacaggggccttctcggcaacctcctcggcaagaagaaggctgaggaggacaaggagaaggaggaggagctggtcaccggcatggagaaggtctccgtggaagagcccgaggtcaagaaggaggagcacgaggatggctagaag

SEQ ID NO: 9842 - DNA, 343 bp, Triticum aestivum
  Clone ID: uC-tsrow189080d06b1
gtgttgaaggcgccgcggacgatgactcgagggggatgtattccggcgcctggtcgcctctcctgctcggcctcgtgctgctctcgctcttctcagtgggcacagtgtcggcgcagcaaaagttcggcatcaactacgggcagatcgccaacaacctgccggaccccacgcaggtggcgagcctgctccggtccatgaacgtgaaccgggtgaagctctacgacgcggaccccaaggtgctgacggcgttcgccaacacgggcgtggagttcatcatctcggtgggcaacgagaacctgcagaccatggcgaccagccccggcgcggcgcggcagtgggtggc

SEQ ID NO: 9843 - DNA, 446 bp, Triticum aestivum
  Clone ID: uC-tsrow189080d07b1
gaagattgtgcgtgacttctgccgcaacattggcttcatctctgatgatgttggccttgatgctgaccggtgcaaggtgcttgtcaacatagagcagcagtctcctgacattgcccagggtgtgcacggacatttcaccaagcgccctgaggatattggtgctggtgaccagggtatcatgtttggctatgccaccgatgagacccctgagctcatgcccctcagccatgtgcttgccaccaagctgggtgcccgcctcactgaagtccgcaagaatggcacttgtgcctggctaaggcctgatggcaaaacccaggtcacggttgaatacctcaacgagggaggtgccatggttcctgtacgtgtgcacactgttctgatctccacccagcatgatgagactgtcaccaatgatgagattgctgcggacctcaggagcatgtcat

SEQ ID NO: 9844 - DNA, 367 bp, Triticum aestivum
  Clone ID: uC-tsrow189080d08b1
tcgttcaatcgtcaggtcctccatgtctctcagggtctagttcgttcgttctggccaacgcgatggcgacgccggcccgccggccgtcggcgcagcagcagccgcagccgcagccgctgacggtggacttcgaggcgctgagctacatcagcaggctcgtggaggcgttccaggcgttcgactccgacaacgacggcctcgtcacggcccccgagctccggggcctgctggcctccctgggcctggacaagtcggaggccgaggcgcgggacatgctggcgcgcgccgacgccgaccgtgacggccggctctgcgtggaggagttcctggacgtgatgaacgccggcgagctcgggctgggcgcgct

SEQ ID NO: 9845 - DNA, 434 bp, Triticum aestivum
  Clone ID: uC-tsrow189080d10b1
ttttcaagaccggaaggagcggagccgccgagccgggaagagccaccatcccatcgcctccgtttccgaagggtcagagatggcggaccgtgctaaccacccgtctgtcatgcagaagtttggtggacagttccaccttgcctccagcttctctgagggtgttcgtgctcgcaacatctgcccttctgtgccatcctatgagaggcgcttcaccacaagcagctacatgactcagaaccttggcatcagtgtcccaatgatgtcatcttctccattgtttgccaatgcaccccctgagaagaaaggtgtcaagaactttgcgattgacttcctcatgggaggagtgtcagctgcagtttccaagactgctgcagctcctattgagcgtgttaagctgcttatccagaaccaggatgagatgatcaaggctggca

SEQ ID NO: 9846 - DNA, 490 bp, Triticum aestivum
  Clone ID: uC-tsrow189080d11b1
tttcacgcgtccgccacccggcccacacgcggtgaagaacgcctactgcctgctcaactttggagacagcattaccacggatcatatttcacccgcaggcagcattcacagagacagtcctgctgccaagtatttgctcgagcgtggcgtggaccggaaagacttcaactcatatggtagccggcgcggtaacgacgaggtgatggcaagaggaacatttgcaaacatcaggattgtgaacaagtttctgggtggagaggtcgggcccaagactattcatgtgcccacaggggagaagctctctgttttcgatgcggccacgaaatacaaatctgaaggtcatgatacgatcattcttgctggcgccgagtatgggagtggcagctctcgtgattgggctgccaaggggccgatgcttcttggtgtgaaagcggtgattgccaagagctttgagcggatccaccgaagcaacttggtcgggatggggatc

SEQ ID NO: 9847 - DNA, 363 bp, Triticum aestivum
  Clone ID: uC-tsrow189080e04b1
tttgttcgtgggttcagaggaaagtgcccttatggggctttttagctttatttacaggggaaagttgacgacaaatgagccaacccttctgcttgatatcttgatgatatctgataaatttgaagttgcttcttgcatgagacactgcagtcaattgctaaggagctttcctatgaccacagaatctgcacttctctatctagatctgccttccagcatttcaatggctgcagctgttaaaccactgactgatgctgccaaggaattcctcgctaacaaatacaaggatctgaccaagtttcaggatgaagtgatgaacattccccttgctgggattgaagccatcctatgtagcaatgacct

SEQ ID NO: 9848 - DNA, 352 bp, Triticum aestivum
  Clone ID: uC-tsrow189080e05b1
tcgtcaccggggccaccgtggacgccgacatcacgcgcatgtctccggtggggccccaaggagtgggcccgccccatcgtccgcatcgcggtcgatggcgccgtcgacctggtggaccacgccgttgcacgcgccttcgggcaatgccactcgttcaattacctgcgcattcaggcgaagcgggagagcatgccgccgtgcgggccggacggggagtacgacccgacgcaggcgaacgtgcaggcgctgctcgcggcggcggacgaggcgatgaagcagcgcaacgtggagtcggtgctcttcgaggggaggcggatcggggagcagaccaacgcggagaagctggagtggt

SEQ ID NO: 9849 - DNA, 479 bp, Triticum aestivum
  Clone ID: uC-tsrow189080e06b1
tttctcgtccgggaatggttgctccaggtgaaagggtggctggtgctcgtcggccggcggcgacggcgcgcgtgggcgtcgttatcctccttggaggcgtcgtcagggatctttgcagccctactcccggatcaagacctttaggtgaaaatcaagatcctgctgtaggatcgggcggtggcgtcgtcttcagcgtcgtttcccctcttgagggcaccgtcttgaagatcttgatcccaatggtgctttttacggactggatgtgcatggtggcttcagtggcaatgatgatggggtgagcaaggtcgaaggcatggcactggtcgaggtagtcgtctcttctccggcgtgtccgtgagattgcctcggctgtttgttgttgtgaagtcgaagctgcggtggagaggcccaggtggcgtacgcgacaggtcgtccgttcggcgatcctccatgatgcctactatgcctagcttttcgta

SEQ ID NO: 9850 - DNA, 423 bp, Triticum aestivum
  Clone ID: uC-tsrow189080e08b1
ttcacgcgtccgtgcaattgatcaattggaggttcagttcaaccaatctgactgtaactttgtcatggttagtgcacaggaagattcttctacgttgaattcagatgtttatggccaagtcgtccattctacttctcttacattgttcagcaataaatggatgcggttgacgcatgaagttaaatcaggacaaagtggaaagttggaatgtttatcggtgaaggcaataataaataagcaccttgtggtttgctgccaggctgaaagtcctgcttcaatggaagacttcccgctgtggaaatttgaggatcaagtggagacattgcctacaaaggatgctgcactcgccttttccgggcagaaactgattcaagtcgaagagccagacactcaagttgaccttgtcttagattctactggccc

SEQ ID NO: 9851 - DNA, 411 bp, Triticum aestivum
  Clone ID: uC-tsrow189080e09b1
tttcacgcgtccgcccacgcgtccgcccacgcgtgcgcccacgcgtgcgcccacgcgtccggtctttttcttccacgacacgttgaggccagggtccatgatcactccgaccatcccgccgaccacctacatgccggcgcttctctccggcaacgtcgccgactccatcccattcaccaccgagcacctctccgacatcatcacgatgttcgcgccggcgtcactcacgatgaccagagagatacggtggacgctggacacctgcgagcacccacggacgctccccggccagaaagcaggctgcgccaccttcctcgagtccctcgccgagctgccggtgtccctgcttgggaggcgaaacgtgcgcgcgttctccgccgtggatctgcccatggatgccgcggggacacc

SEQ ID NO: 9852 - DNA, 409 bp, Triticum aestivum
  Clone ID: uC-tsrow189080e11b1
gtgagagggagagcctgccttgcctggccgagattcctctcggagtcgggctcgggggatctcgccggccgctacgcgatggagggggaggacggcggcggcggggtggactgggacagcctggccgaggcggcgtcgggggccgtcggcgcgctcgtcagcaccaccgtgctctacccgctcgacacctgcaagaccaagttccaggccgacgtccagacggaccagggcgcgcacaagtacaggaacctttcagatgtcttttgggaagcaattaagaaaaagcaatttttgtccctatatcagggccttaagacgaagaatatccagtcgttcatttcgcagttcgtttacttttatggctatagctatttcaaaagactctacctggagaagagtggagctaagt

SEQ ID NO: 9853 - DNA, 432 bp, Triticum aestivum
  Clone ID: uC-tsrow189080e12b1
ttttacgcgtccgcaagaattcctcccaccccggccgtctctccgccgccaccgcggccgcagctagataagaagaaaaaaagagagagaagaactcgtcgggagggctcgagatctgtgtcgggagagagggaattcttgagatcggaatcggaacaagcgggcgcgctcgggatcggggttaccatacaatttttcccaggaacctttagtgaatgtgctaatggagtcaaagggtggcaaaaagtctagcagtagtagttccctgatgtacgaagcacccctcggctacagcattgaagacgttcgacctgctggaggcgccaagaagttctctgctgcatactcgaactgcgcgaagaagccatcctgatatcgtttttggcatccccttctcgtagtttaggatttttatgcaattttattctgact

SEQ ID NO: 9854 - DNA, 190 bp, Triticum aestivum
  Clone ID: uC-tsrow189080f04b1
cacggatgatgctgaaaagcaaataagggggcgccttaaagccgatctcgggctgacaacgatgagggaggacaatggcggtgccctgttgccgaggaccggggaaggcttggcgctgaggccaaagtcgggaagtcggccagacatgaataacagccagcatgatctcatcgcggcagggttcgtgcct

SEQ ID NO: 9855 - DNA, 415 bp, Triticum aestivum
  Clone ID: uC-tsrow189080f05b1
tttttcatcacccaccccccgccccctcaccactccaccagcaagcacaagcacaagcagggcaccaccgcaggcacaagagaggagagggagcaagagctcatacatactcttcaaccaaggcaaggcaagaggatgaacgaggaggcggaggggaggggggcgaggcccggcgtgcttaaggtggtggtggcgcaggggaccaacctcgccatcagggacttcacctccagcgacccctacgtcgtcgtccgcctcgcagacaagagtgcaaagacaaaagtcatcaacagttgcctcaatccagtttggaacgaagagatggtcttctctatcagggaacctctagggatcatcaaatttgaggtgttcgaccgggaccggttcaagtacgacgacaagatgggacacgcct

SEQ ID NO: 9856 - DNA, 218 bp, Triticum aestivum
  Clone ID: uC-tsrow189080f06b1
ttctttaccattccagctccaccacgcggtcaggggggctttcacatcgggagagccttagatcccacagctccatccccacttgttccgatccattcatttcacctttggcgcgtgtgggtacagccatcaggcatcagccatggctgccggaggagtggtgctcaacctgcgcgtcccgtcggcgtcagtggcgccggcacggcggtgtgggacgg

SEQ ID NO: 9857 - DNA, 332 bp, Triticum aestivum
  Clone ID: uC-tsrow189080f09b1
ttggttctttgaaggccgaagaggagaaagggggcatgttaacggcacttgcacatgggtaagccgatcctaaaggggggtaaccccggcagatagcgcgatcacgcgcatcccccgaaagggaatcgggttaagatttcccgagccgggatgtggcggttgacggctacgttaggaagtccggagacgccggcgggggcctcgggaagagttatcttttctgcttaacggcctgccaaccctggaaacggttcagccggaggtagggtccagtggccggaagagcaccgcacgtcgcgcggtgttcggtgcgcccccggcggcccatgaaa

SEQ ID NO: 9858 - DNA, 462 bp, Triticum aestivum
  Clone ID: uC-tsrow189080f10b1
ttttatgacaagatcatagctgtctgtgctgatgatcctgagtaccgtcacttcagagacatcagtgaacttcccccgcatcgcctacaggaaatccgtcgcttctttgaagactacaagaagaatgaaaacaaggaggttgcagtgaatgatttcctcccagcagaagatgccatcaacgcaatcaagtactcgatggacctctacggttcgtacatcatggagggcttaaggaagtgatctccagttggcggactgcggatgctacgcgatccgccctacggcttatcaatagtacgacaaacatctatgttaacatgatgatcgaaaaccatcagtctgttggggatctatatataccttctgtccatgctgagtcaagcatgggtacattttccttccgtatatgccatgtcaggtccaagtatgtgacctcttgctggaaccttttttgtcaaaccg

SEQ ID NO: 9859 - DNA, 326 bp, Triticum aestivum
  Clone ID: uC-tsrow189080f12b1
tctcttcgcgtccgtccacgcgtccgctgtatttggggtatgttagcatgagtcggggtcagtcaaaccattggtggcctcatcagcatgcaattgtttttgcactctcttaacgatttcagctgatttatgtccgtgcttgcaaagagcgtctggattgctcttaccacctggataaatatcttttcatggatcattcaagaaacttgaagtgcagatatccttcatacctttttttgtcaagaaaatatgactaagacaataaatgggaaatatttcaactggatttgagataggagatcaagagtcaaaatcattcaaccatt

SEQ ID NO: 9860 - DNA, 402 bp, Triticum aestivum
  Clone ID: uC-tsrow189080g03b1
cttccttcaacaatggctctcctcaagaacttcgccgctttcctgtgcgtgatcctggccacgctcgccttcgtcgcgcaggatgcgctcgacgccagaggtgctttgaacaacgtgaagggatacacgggtacctacacaggcaacccatgcggtggttacggcggtggttatgggaacgggaagtttccatgataggccgcatatgatgatacttggagcacggaaatacaaaatacgtacggcagaccatgaataaattatcacccgttactggtataatcgactctctctgatccataataagtctcgcagttttgtaccaaggtcagttcaaaccttaatacaaaactgcaacacttatcttagattggagggagtaccaaaaacatagtgaatgtt

SEQ ID NO: 9861 - DNA, 422 bp, Triticum aestivum
  Clone ID: uC-tsrow189080g05b1
ctcattcgtccgaacagagagcattctaccaccgcaccgctcgagtgaagtgagagctttgcacgaaaagttcatcagcgaccatgaagggcaccaagctcgcggcgatcctcatcctccaggccgtcctggtcatgggagtcctctcacacgtgaacgccgactatttccccaagtgctgcaacaactgcaggtccttctccggggtcgacgtctgcgacgacgcccaccccaagtgccccaagggctgctcggcgtgccgcgtggtgtcgacgagccccgaaatgtggcgctgcgcggatatgaaatccaccgtcgacggcacctgcggtgggccctgcaagaagtactgatcggctcatgccagcatgatatgttccgcctaaaatgaaataaaagctcagacgagatgagcagcgtca

SEQ ID NO: 9862 - DNA, 247 bp, Triticum aestivum
  Clone ID: uC-tsrow189080g06b1
ctcccacggcgcgacggttgaccagtcttgatttcaccgctccggccgctgattgatcggtcgaccgccgcggcgatgggaggagggtcatggcggctccgttaggggcttcttggtcggctccctgttgcgatggcgttcaaggccgttgctgagatagtcgatgacaagcaatgcagtaaaagcgccgccgagtcgtccgaggcggtgccttctcggaggcagtccgaggagctaattgggggag

SEQ ID NO: 9863 - DNA, 403 bp, Triticum aestivum
  Clone ID: uC-tsrow189080g07b1
tttttacgcgtccggtccttccttccttccttgtcggtaaggttctgtggccatgtctgacagcgagaaagaggtgccagtgccagtgcaagcggacgaatgcgccgcccggggggccgactgggaggtggtcacactcaccgggtccacctacgccgtcgtgcccagcgggccagaaggagcatcagagggcacgaggctcggcgactgcaacgacagccggggctcgtccaccacgctgctcatgtcggaccactttgtgttcccccccagcgagcacgagaacctgtccatagagaccgtcctgctcgacccgtctcaggaaagtaccagccttgaagatgccggcttcaagaatgtcggtgggagctacgatgatgggtccgagactgtcaagtactat

SEQ ID NO: 9864 - DNA, 397 bp, Triticum aestivum
  Clone ID: uC-tsrow189080g08b1
tcgttattttgcaggtgaatgccttcccaatcgctgtcatgtttggcatgtgctccattttcctattcatcgcagcaattttgcagaggcggctgatgtccgtgtccgaccttcacagatcaactagtatgttgtctttattcgtttcaattttgatgcaagcaaatgccattttctctcttggaattagactccgacttaacaaattgctaaccacaagatcaaattcctgcagaagccgcagagatgacagcagaagatgagccactaaacccttgaaacacaccagcagccattgacgtgaaccgggcatggaacggtctccaacttcatctgcttctctgcagggctgctgaataagatgggaaaccgaaagctgcaacaaaacctcgtttag

SEQ ID NO: 9865 - DNA, 417 bp, Triticum aestivum
  Clone ID: uC-tsrow189080g09b1
ttcttcccaagatatggtttcttgcggtcatctactttattcttggttgcccaggtgcctactatctgtggtaccgaccactttaccgcgccatgagagggattttcccatcgatcagcttgataggaaagagcgtcgcagtaggggtgttctactttcttggctttgcaatgttttgcatcgagtcatcactaagcatgtgggtcattcagcgcgtgtatcactattttcgaggaagtgggaaagaagcacagatgaggcatcaggcagcacgtgccacaactagggcagcattttgatattgaaaagcaatgcatacattgatatggtttttactctcgcaacttttaaattgtagagacttgtaagttaactggcatgtaggactttgtttgtcctatgcaaaagtttatgccc

SEQ ID NO: 9866 - DNA, 302 bp, Triticum aestivum
  Clone ID: uC-tsrow189080g10b1
ttttcatcatccccgataccaaagctcatcttcttctccttgaaatctttttgggttcacagatttggaggatgtcttgcaactgtggatccggttgcagctgcggctcagactgcaagtgcgggaagatgtaccctgatctgacggagcagggcagcgccgccgcccaggtcgccgccgtggtcgtcctcggcgtggcgcctgagaacaaggcggggcagttcgaggtggccgccgggcagtccggcgagggctgcagctgcggcgacaactgcaagtgcaacccctgcaactgttaagct

SEQ ID NO: 9867 - DNA, 455 bp, Triticum aestivum
  Clone ID: uC-tsrow189080g11b1
ggtctcccacgcgttcttgtcgaccccacgttccaagttcatggtccgggatttgattgatctccgttctaacaactgggttcctcgccgtgctgagattaaggcgaagacaatcagcgagatccacacagaggctgaaaagaaccttggattacgtccaggggccacagcgaacatgaggaatggccgtaatgcaccaggtgggcctctttcgcctggaggtttttcagtgaaccggccaggaacaggaggtatgatgcctgggatgcctggatctagaaaaatgcctgggatgcctggtttagataatgataactgggaagttcagcgttctagatcaatgccaagaggcgatccgcttcgcaaccagggttcgttgattaataaggtttcatctattaacaagccatcacccatcaaccccaggcttcttcctcaaggcactggagcactga

SEQ ID NO: 9868 - DNA, 230 bp, Triticum aestivum
  Clone ID: uC-tsrow189080h03b1
acccacctctcaaccatggcggagcataccgagaagtctttcctcaagcagccaaaggttttcctcatcaccaaaaaggccgacaaggcaaagaggcccggcaaggctggcaaccgcttctggaagagtgttggccttggtttcaagaccccaagggaggcgattgatggtacctacattgacaagaagtgcccattcactggaactgttgccatcaggggcagaatcat

SEQ ID NO: 9869 - DNA, 415 bp, Triticum aestivum
  Clone ID: uC-tsrow189080h04b1
gttcttcagaactaccttcttctgggctacaggtggccttatttcaaggctgggggcactcaaggacgcatcatcttccacaagtggaaggagggcaagtgggccatcctcttctcgcaccctggcgattacacgcccgtgtgcaccacctagctgggcatgaccgccaagctgcagcccgagttctccaagaagaacacgctcgtcatcggcctcagcgtggacaacgtcgatgaccaccactggtgggtcaaggacatctagtcgacccagaactgcacggtgaactaccccatcgtggccgacccggacaggacggtggccgagacctactgcatgatccaccccaactcgcccctcaccatggccggcaagctcaccgtccgcaccgtctggatcatctaccccaacaaca

SEQ ID NO: 9870 - DNA, 290 bp, Triticum aestivum
  Clone ID: uC-tsrow189080h05b1
ttcattgcaaatcaatatgtcccctttatagttgctggtggcaaaaaatcgtacttcactacaggtgctgttgctcgaattgcactggccgatggggttcttgtgatcgccctcattttggtgggactattctctttgcgacagaagagaacgaacacggaactaaaataacgaatcaccaacccttttgcttcatggggcgcggcgcataaagacagcggaggagctccacagctgacaggagcgaggttcttctccttcgaggagctgaaaatctgcacggacaactt

SEQ ID NO: 9871 - DNA, 376 bp, Triticum aestivum
  Clone ID: uC-tsrow189080h08b1
tttctctgactccgggaggcactgaattctcggggggggttctctatactgccggggggtgatctgatcgggtctcccgcatactattcgggcctcttgcttccggacacagttcgggccgaacaacgttgactaaaaaaacagagagagagaagcagcgcagagtggctacctcatgtcctcttcaggctatgtcgctgttctcggtgctcggtgatcttcgatggcacaaactatgcagagtttacaggtttcatgcgtattcacatgcgcggtcttctgctgtggggcgttctctctggcgaggtaccctgtccgccctgccctgttgcttcggttgcttctgttcccccagtgcccccggtgcttgctgttg

SEQ ID NO: 9872 - DNA, 183 bp, Triticum aestivum
  Clone ID: uC-tsrow189080h09b1
gagactagcaccactagcgagctcggccgattccgattccgtctgcgctattaaggtttgtttggaggaaggggaggagtctcggaggtggagctgaggagagagaccggagatggcggcttcctctaggcatggggagagggcgaccagcttctccatggcctgcatcctgctcagccgcta

SEQ ID NO: 9873 - DNA, 385 bp, Triticum aestivum
  Clone ID: uC-tsrow189080h10b1
tttgttaaaggtaatcccaatccccacagaagtgggggtttattaaccctaggggggattcccgatcccggcgagcgagatggccaacccgagggtgttcttcgacatgaccgtcggcggcgcgccggccgggcgcatcgtgatggagctgtacaaggacgcggtgccgcggacggtggagaacttccgcgcgctgtgcaccggcgagaagggcgtcggcaagagcggcaagccgctgcactacaagggcagcgccttccaccgcgtgatccccgacttcatgtgccagggcggcgacttcacccggtgcaacggcaccggcggcgagtccatctacggcgagaagttcgccgacgagaagttcgtccacaagcacaccaagccc

SEQ ID NO: 9874 - DNA, 378 bp, Triticum aestivum
  Clone ID: uC-tsrow189080h11b1
tacggtatccgtgatgttgacaacgggagtctggattctctgaaggagctgctgttccttggaatcactatttatgcagaggatgtgctaaagaaattgaacatgcctcgtcctttggcaaagtcaacacatcgcttaaacttgaagtattgtgcagatatgcaatcaatcaaaatctctgacctcagccacatggagcaccttgaggagctgtatgttgaatcatgctatgacctgaacacagtggttgctgatgctgagcttacaacttcacagttgcagttcctgaccctgtcagttcttccctcgttggaaagtgtccttattgcaccaatgtcccataattttcagtacatccgcaaattgatcatttcacac

SEQ ID NO: 9875 - DNA, 226 bp, Triticum aestivum
  Clone ID: uC-tsrow189081a01b1
ttgattcgtgggggtgttcaatcctgcccaccagtatattcttagttaaaaatggatcattcaaaagggaccaccctcgcctttttcttccttataaattgtataagttccaaatttttggttcctagcttgatcacatggcaattggcaacatatgtcataaaaaatgatagtctataaaacgatcatgcacgtctggacaagcatggatgaatgggaggggatt

SEQ ID NO: 9876 - DNA, 354 bp, Triticum aestivum
  Clone ID: uC-tsrow189081a03b1
cttttgtgaatccaggagcagattatgctgcgcaggttttcagaatgccagaattcaatgttcattcacaagttctcccttctgcatctgaggccctaagttcacagcttgcgagcagtagccctattgcaatgtctacacaacagcaacatatgtcccagcaacaacaagcagcgcatatgtaccctccaatgcacgtgcacgcattatccgaatttcatgccatatcgacatcctctctattctccaggatatgtcccacccatggctatgccaaattattcagcacatgttccttatccggcaaatggaaataattatcttcagatggccggtgggggttcacatttaact

SEQ ID NO: 9877 - DNA, 277 bp, Triticum aestivum
  Clone ID: uC-tsrow189081a04b1
ggatgcaggagcagataatgctgcgcaagtattcagaatgccagaattcaatgttcattcacaagtcctgccttctgcatctgaggcccttagttcacagcttgcgagcagtagacctattgcaatgtctacacagcagcaacatatgtcccagcatcaacaggcagcgcatatgtaccctccaatgcacgtgcacgcattatccgaatttgatgccatatcgacatcctctctattctccaggatatgtaccacccatggctatgccaaattattc

SEQ ID NO: 9878 - DNA, 172 bp, Triticum aestivum
  Clone ID: uC-tsrow189081a06b1
cgcgtccgcttttgttccacacgagatttctgttctcgttgagctcatgtggatgccttgcaactgcggatcaggctgcagctgcggttcagactgtaagtgcgggaagatgtaccctgatctgacggagcagggcagcgccgtcgccgaggtcgacaccgtggtcgtcctc

SEQ ID NO: 9879 - DNA, 364 bp, Triticum aestivum
  Clone ID: uC-tsrow189081a07b1
ttatcgcgtccgcccctcacgcacccagccgcgactcggccgcaatggcggagcccgtggccaacgcggcggcgcccgcccccgcccccggccgcctccgcaacgccttcggcggcgtgctctgcgcctttaccctcatcctcatcggcgtcctcgccttctcgatccgcctcttctccgtgatcaagtacgagagcgtgatccacgagttcgacccctacttcaacttccgcgtcactcagtttctgtcgaagaatggaatctacgagttctggaactggtttgatgataggacatggtatccccttggtcgtgtgattggtggcactgtgtatcctgggttgactttgacagctggaagcat

SEQ ID NO: 9880 - DNA, 389 bp, Triticum aestivum
  Clone ID: uC-tsrow189081a08b1
cttcgcgctcggcatccaccgatcgattgcttctgtcttggccatccgctgataagatcatcgacaggcgcctccccccagggatcgatcgaagatgccgaagatagcgctgggccaccgccgcgaggcgtccgaccccggctgcctccgggccgtgctcggcgagctcgtcctcaccttcctcttcgtcttcgtcggcgtgggctccgccatcgtcggaggacaagcagtcgcagccggaggcgacacgtcggcggcgttgatcgcggtggcgctgggccatgcgctggtggtggcggtgttcgcaaccgcagggttccacatctccggcgcccacatgaacccagccgtcacgctcagcctcgccgtcggcggccacatcaccctca

SEQ ID NO: 9881 - DNA, 374 bp, Triticum aestivum
  Clone ID: uC-tsrow189081a09b1
tcggtttgttactgttagcttcaaagagggtcttggccaaaagtttaggcaaccttctgggacgggaattgacttctcagcgtttgaggactctgagttgttgaaacaggggggaatggaaatatatccacttgcagttaaagctgaaacaacactgtctgctgatcaaccatcggagggggaagaccagaagccaaaaactccaaactcgcatatcacacaggctgtgtttgaaaagaaagaaagtggcgactatcaagtacgagttgttagtcagatcctttgggtgaatggcaccaggtatgaattgcaggaaatatatgggataggaaactctgtggaaggggacactgatgcaaatgatcctgggaaag

SEQ ID NO: 9882 - DNA, 388 bp, Triticum aestivum
  Clone ID: uC-tsrow189081a10b1
tttgtttccatgggtgtgtactctgatggttcatatggtgtgcctgctggtcttatctactccttcccagtaacgtgcagtggtggtgaatggacaattgttcaaggtctcccgatcgatgagttctcgaggaagaagatggatgcgaccgcccaggagctgtcggaggagaaggcgctggcctactcatgcctcgcgtaaatccacattggaagggcagctgctcctctggatgttttgaataaatgaaaccttccgctccttagaaactctcgtctccacccagaacagccgcacatcgcgatgcatgctccttttcgctggttttcccagtgtgtatgaaggcttgtagctccccttttgcctgatgatttacaggacagtacat

SEQ ID NO: 9883 - DNA, 140 bp, Triticum aestivum
  Clone ID: uC-tsrow189081a12b1
cgcgtccgcttttgttccacacgagatttctgttctcgttgagctcatgtggatgtcttgcaactgcggatcacgctgcagctgcggttacagactgtaagtgcgggaagatgtaccctgatctgacggagcagggcagc

SEQ ID NO: 9884 - DNA, 321 bp, Triticum aestivum
  Clone ID: uC-tsrow189081b01b1
tttttataatgattgccttgcatgacggggaagttgccacatgttcacccttcaccaattgacttggttgaaaagatgctgactttcgatcctagacagagaataacagttgaaggcgcacttgcgcatccttacctggcatcgctgcatgatataagtgatgagccagtctgcacgatgcccttcagctttgacttcgagcagcatgcgttgtcggaagaacaaatgaaggatctaatccaccaggagggcatcacgttcaaccctgattaccagtagctggagttcctttgatcggcttcattcatatggaaagttttc

SEQ ID NO: 9885 - DNA, 227 bp, Triticum aestivum
  Clone ID: uC-tsrow189081b02b1
tttactcgtgggcggacgcgtgggattgttttgtttttatatgtttacggttattcaatcacatgtgcaggtgtggtgacacttaaaaaaattaaatgtacaggtgttgtgtacgtccgtacgtgtgcatcgtatacatgttccatacgggctagacgacaaccacaggcccggtcatttgacttgattattcagtactcatacatgtccaggacatgtgtgtgtgc

SEQ ID NO: 9886 - DNA, 424 bp, Triticum aestivum
  Clone ID: uC-tsrow189081b04b1
tttatagagctctcctctccatacctctcccttcgctccaccaggagtctagggttagagagagagagagagagcgagacgagcaaaaacaatctctcgccccactgttataccaagttcgcatccatctcactgttatacatccttgtatcacaatgggtggcctatccatggagcacccttgggcattcgccttcggcctactaggcaacgtgatctctttctcgagcctcctggccccgataccaacattctaccggatcttcaagagcaaatccacgaaggggttccagtcggtgccctacgtcgtggccctgttcagcgcgatgctgtggatcttctacgcactggtcaagaccggtgagggcctcctcatcagcatcaacgctgtcggctgcgtcatcgagaccgtctacatcgtcat

SEQ ID NO: 9887 - DNA, 338 bp, Triticum aestivum
  Clone ID: uC-tsrow189081b05b1
tttattcgtccgaaccaactcatttctcctaccacctggggaccaccagcccaagcagagccatggcgcccaacggagacaacaccgtggccaacgtccacagcgggatcgacagcaccaacaagacgctgctcaagagcgacgccctctacacctacatactagacaccaccgtctttccccgtgagcacgagtgcatgcgcgacctgcgcctcatcaccgacaagcacccatggggctacatgcagtctgcgtcggacgaggcacagctgctggggatgctgatcaagatggcgggcgccaagaagacgatcgaggtggggcgtgttcacgggcta

SEQ ID NO: 9888 - DNA, 99 bp, Triticum aestivum
  Clone ID: uC-tsrow189081b06b1
tttattcacctgtaccgacccatgtccggtacaacaaccgcctcaaggacacaaccatgcacgggcgccgccatgtggacgactccctggccagagccc

SEQ ID NO: 9889 - DNA, 482 bp, Triticum aestivum
  Clone ID: uC-tsrow189081b07b1
tcgctatcgcgtccgaatcattagctacatacagataaatgtacgatgtattccatgttaggattttctgaagctcgattgccactacttctctagctcatatgtgataatgtgatcatgcaattgtcatgggtttaactgaatcttgttatcaattgtcatgtatgacagtacgacacatttgtcttgtacaggagtgcagttctgtatgtgatcagattttcttaggctgtattgttgacggtcatgtctgcttgttgttgtcatggcaagaaatatttttagaatattctgcattgatgatttttatcattaatcaaatgctacataaattgtttattgttctcagcaatactgccgctgatttcggcgatcatcactgttgagtctctgttcgtgacacagagtctatcaccaaagcccggcggctccaaagcagcaccggaagagaccttgcatagtcaaaaagacaagcagtgatc

SEQ ID NO: 9890 - DNA, 390 bp, Triticum aestivum
  Clone ID: uC-tsrow189081b08b1
tcgtttgcattaacagttctccttcaacgatcattcaaaactactaggaccacactctcaaccccgcaaaggcgaagattttcgtctgagaggacatttcatacaagtcaaacttcaaatgctgggcttgcttatctcggcgggcaatcagttgttggagctaccggattaccccaagttgaagcaaaatatccagctttgctctttaaacagcagcttgtggatctaattgagaaggtttacggtatgataagtgacagcgtgaagaaggaactaaaccctttacttgaattgtgcatccaggatccacgaacttctcactcaaatctggcaaaaagcaatacaaatggcttgggacaacagaaccaattagcacattggttaagcatc

SEQ ID NO: 9891 - DNA, 319 bp, Triticum aestivum
  Clone ID: uC-tsrow189081b09b1
atcagttcctaatggtcattctgatgttgttaaagaagctgtgcataatgctgtggttcagaaggttgtcacggcttcagcgtctgtatcagcagaagcagtccccacatctcatcctgtgcaccaagatctcttcagtctgtcaatagcgcaggactcagcaacttcttcttcccctccgtcagtggatctgtttgctggctttgaccaacagctgccacctacgtctagtgttcatcatattacaccagcagctccattgcctgctaatgaagggtgggcattcttcgacacacctcaatatggttcgtcaacttct

SEQ ID NO: 9892 - DNA, 85 bp, Triticum aestivum
  Clone ID: uC-tsrow189081b10b1
tttgttcctttttgtatattgtaacaggaaaactgactacaccttgatttttatacgaacgagtcaactcgtgcccgtcttgtgc

SEQ ID NO: 9893 - DNA, 381 bp, Triticum aestivum
  Clone ID: uC-tsrow189081b11b1
tcgtctacgcgtccgcgaaaccctagccgccgccgccgacgaccgcgagcaggctcagatgggaggcaagtgcccgcaccgcaaggtcaaaaagcgccgtctcaactgcaagcaggtgcgccgtggcaagttcctcgtcaaagccgacgacgccgtctacgacgagctcgtcaagctggccgaccagggcaaggattccgagggcaaggcgcttcccgtcgacgaggacctccccggcatgggccagttctactgcctccactgcgatcggtacttcgcggatgagaccgtgaaggaggatcactaccgctcaaagcgccacaagaaaagggtcaagcagttgtctggaccagccccacacacgcaaatagatgcccgatc

SEQ ID NO: 9894 - DNA, 331 bp, Triticum aestivum
  Clone ID: uC-tsrow189081c01b1
gttcatatcatgccgacggccatccgcaagcgcccggcggcgggacaagaaccgcgcgtccatggcggcaagaggccccgatacgcgttcgggagcatcaccgactacgagaagcttgaggtgctcggagaaggcacctatggcgaggtgttcaaggcgcgcgaccgccgcaccggcaagaaggtcgccgtgaagtgggtccgtggcaacggggccggcggacacggcccgcccgacatccgcgcgatcacccgcgaggccggctgcctcggcgcgtgtcggggtcacgagtctattatcgagatcttggatgtggcgacggatgccgaga

SEQ ID NO: 9895 - DNA, 339 bp, Triticum aestivum
  Clone ID: uC-tsrow189081c02b1
gtttttatcatgccgacgggcattcgcaagcgcccggcggtgggacaagaaccgcgcgttcatggcggcaagaggccccggtacgcgttcgggagcataaccgactacgagaagcttgaggtgctgggagaaggcacctatggcgaggtgttcaaggcgcgcgaccgccgcaccggaaagaaggtcgtcgcgaagtgggtccgcggcaacggggcctgcggacacggcccgcccgacatcctggcgatcacccgcgaggccggctgcctcgtggcgtggcggggtcacgagggtattatcgagatcttggatgtggcgacggatgccgagacaggggac

SEQ ID NO: 9896 - DNA, 437 bp, Triticum aestivum
  Clone ID: uC-tsrow189081c03b1
gtacacatttggtcttgcagccggtggaccacttcaggttcctccactccaacctgggtcctcagccaggacgctcctagctatggttttctcccagaatgtctctcctggagcaccgaactcgctactgcaggttgcagtgaagaataatcagcaacctgtgtggtatttcagtgacaaaggttcgctgcatgtcttctttggtgaagatggcaaaatggagcgaacgagttttcttgaggcctggaaatctttacctgatgacaatgaattttcaaaagaataccccaattctgtcatcagcagcatagatgccaccattgaacaccttgcagcatcaaatgtgttctttattgccaagcggaaaaatgcaaacatggatgtgctgtatctgtctgcgaagatcccccgtgggattccatttctgatagagctta

SEQ ID NO: 9897 - DNA, 425 bp, Triticum aestivum
  Clone ID: uC-tsrow189081c04b1
atgcactatatatagaggtctgtactattaaatggttctgggtgaaactggcttacgagccggctcggtctgagccgagccatagccaaagcgagccgagccggttgaagtaggctcggctcgtgtccagccctactctgggggcgctgtgccgcggcggaggctggtcctacgcggacatctggcgctccgaccgtcgcgacccacggtgagtcatcacagagcaacacgcatcgcctcatgcgcctgcttcttctcctagatctgcatcgcctgggagggtctcttgctaggtgtctagctcctgccggtagctcaggaaaactctggctctgagtttcttcagaaattgtccgcgcaactttacaccgcggcgttcattttctcgggatttcccatggagtgccgagatcccagcatcaaac

SEQ ID NO: 9898 - DNA, 365 bp, Triticum aestivum
  Clone ID: uC-tsrow189081c05b1
ttgatttctagtgacgacggtcattcagcccatagcaaatatatgccgaagctcatctgttagtgatcatgtatacacaatggcaactcttaccgaccaagactcaagaatattgttcttcaaggaagctttccaagacgatgaaccactgcagcatgtggatgacctcggctctgcagcgctcaagaaatgtgacggtcttccccttgctcttgttaccaccgccaggttcttgcaaagcgcaggtaatccaacacccatgatatgggcaaaattatgcgccgacctgggtacacatctgaagagtgatgatctatttgcaagaatgaggcgtgtgcttgtccagagctacaccagccttgata

SEQ ID NO: 9899 - DNA, 385 bp, Triticum aestivum
  Clone ID: uC-tsrow189081c06b1
tttatttctagtgacgacggtcattcagcccatagcaaatatatgccgaagctcatctgttagtgatcatgtatacacaatggcaactcttaccgaccaagactcaagaatattgttcttcaaggaagctttccaagacgatgaaccactgcagcatgtggatgacctcggctctgcagcgctcaagaaatgtgacggtcttccccttgctcttgttaccaccgccaggttcttgcaaagcgcaggtaatccaacacccatgatatgggcaaaattatgcgccgacctgggtacacatctgaagagtgatgatctatttgcaagaatgggcgtgtgcttgtccagagctacaccagccttgatagccaggttgccaggacattct

SEQ ID NO: 9900 - DNA, 258 bp, Triticum aestivum
  Clone ID: uC-tsrow189081c07b1
tttggacgcaaaattccacgctcccgaaccgagccggcgagtcggaggcgcgttctctacgccggcggcggcgggtggaccagaccgaacaaaccaacctcaagcttctcgccgtcccgggaacgcacgtgccccgggcgtccaccacgacgcctcgatccaccctgctgccttcatgagactactccttgtcgcggcggacctggtgggctgcgccgccgcgcacgagcaccacggcgaggctcccacctgcgccgg

SEQ ID NO: 9901 - DNA, 448 bp, Triticum aestivum
  Clone ID: uC-tsrow189081c08b1
tcttttaatgtgaggtccgtggaagaggcacgcagtataaggttgatggaaaaacagagaattaaagaattgtcattgcagtggagcggaggtgtgagttctgtggaacacatggagttgctaacagagctagtgccaccaagctctgtaaagaatttcaagataacacgttacaaggatgtcatgtttccgcactggtttatgcatataaacaaatatcttcctaatcttgtgagtttggagatgtggggtgtgctttgccacagcctaccaacaacactcgtcccactacccaacctacgaaagattgttctcagcaacatgcataacctggaagagttcaacacagcatgctctataggcgaggatggtgcaaatgagctcacgttggctaaacttgagtatctggcgtatatcacgtgctgacaatgtgctatcgtcatgggga

SEQ ID NO: 9902 - DNA, 347 bp, Triticum aestivum
  Clone ID: uC-tsrow189081c09b1
cccacgcgtccgagcagctgcaattgcctatggtcttgacaagaaggctaccagtgtcggtgagaagaatgtgcttatctttgaccttggtggtggcacttttgatgtctccctccttaccattgaggagggtatttttgaggtgaaggccacggctggtgacactcatcttggtggggaggactttgacaaccgtatggtgaaccactttgtccaagagttcaagaggaagcacaagaaggatatcagtggaaaccccaggtctttgagaaggctcaggacttcttgtgagagggcgaagaggaccctttcttccactgcccaaaccaccattgagatcgattcac

SEQ ID NO: 9903 - DNA, 156 bp, Triticum aestivum
  Clone ID: uC-tsrow189081c10b1
tcgttctcgcgtccgagcagctgcattggcctatggtcttgacaggaaggcttccagtgcaggtgagaagattgtgctaatatgtgaccttgggggtggcactcttgatgtctatctgcttaccatagaggtgggtctgttggaggtgaaggccac

SEQ ID NO: 9904 - DNA, 362 bp, Triticum aestivum
  Clone ID: uC-tsrow189081c11b1
tcgttttcgtggaaaccatggattgctaggggcaacgactttagcttaacccaattttggatcactggaggttcctacaatggcaacagcctcaataccattgaagtgggatggcaggtttatccaaatctatatagcgatagcaatacgagactcttcatctactggactggagatgcatatcaaacaacaggatgttacaacctactatgctcaggcttcatccaaacaagcaatcagatcacaattggcggcagtatctccccaatgtccacctatggtggcacacaatatgacatcgatattttagtttggaaggaccgagcggggggcaattggtggctgcaagtgggaggtgatta

SEQ ID NO: 9905 - DNA, 376 bp, Triticum aestivum
  Clone ID: uC-tsrow189081d01b1
gttgtttggaagagaaggtgcagcggttgctcaagacatgggagatggagatgttccacacggtgcggcccgaggaccagaagagcgtgcactcccagggattcaccagcagcaccaacgggatgaagcctctgacccgaaaggagtggacggctattggcggctacaacgcgttcctggcaaccaagctgccgctggagcaccgcatctacgacccggacacggagacgttcgactccggcatggagacgttcctcacggcattcccccggggcttcgccatcgaggtgctcgacgtgtactgcagcggcccgcctagggtggccttcaagttccggcactgggggtacatggaggggccgttcaagggccaccc

SEQ ID NO: 9906 - DNA, 344 bp, Triticum aestivum
  Clone ID: uC-tsrow189081d02b1
tgattaatatactctgagtaattcaaggtttgccttgagcatagaaccaggaaatgaagaacttcaggaatacgctgcaagtacagctgatctgcgcaataagaatacaccaacggtgccaacaacaattgcgagagagaagcagtgcaatcctttcttgaggacctcaagtccagagataaagaaaaggctgtccattccagatcatttcgatgatgcacgtgttcttgaagttatccgacgggcgaaggataatttttgactaaccacaaaggaaattcttataaaacgatgacccaaccatcttttcgaaagaagtagagtggacaaagaaccccgcaaga

SEQ ID NO: 9907 - DNA, 434 bp, Triticum aestivum
  Clone ID: uC-tsrow189081d03b1
ttactcgtccgctagctagtcatggcatcttccaagagcagtcttgcaatgttcgcactggccatagtcatggccgtggtggctgacgtctcggcgcagaacaccccgcaggacttcgtcaacctgcacaaccgcgcccgcgccgtggacggtgtcggcccggtggcgtgggacaacaacgtggccaggtttgcgcaggactgggcggcgcagcgcgccggcgattgccggctccagcactccggcgggccgttcggcgagaacatcttctggggttccgggcagtcgtggacggccgtcgacgcggtgaagctgtgggtggacgagaagcagaactaccatcttgacagcaacacctgcgacgccggcaaggtgtgcggtcactacacgcaggtggtgtggcgcaagtcgacccgcatcggctgcgcgcgcgt

SEQ ID NO: 9908 - DNA, 350 bp, Triticum aestivum
  Clone ID: uC-tsrow189081d04b1
ttctttcgtccgttcttccccgtcccgatcgacagaaacccaagaaagtctgaacaaagcaccgatcaaagaacgatccctcccaaatcaatcgctcacccttccgcttcctaacaccagctaaatcgtccattccttcgaccagcagctcgaatccccaccgacaatgtcgctgatccgtcgcagcaacgtgttcgaccacttctccctcgacctctgggaccccttcgacggcttccccttcggctccgacggcagcggcagcctcgtcccgcgcaccttctttgacacggtggccttcgtcggcgcgcggatcgactggaaggagacgcccgtggcgcacgtgttca

SEQ ID NO: 9909 - DNA, 435 bp, Triticum aestivum
  unsure (1)..(435): unsure at all n locations
  Clone ID: uC-tsrow189081d05b1
ttgacgcgtggccggcgctcggccttctccccctcgcaatcgcatcgcgtcgcccggattctatattcctccgcggaaacctcacgcaatcccaacagatatcccccctcccaatcccgtcccctctccgcggcaatctgttccgatcgtagcccgttctgcgtctcatccatcccgtctcggatcccatctcctcacgccctcgtaagcgactttccccctcctcgattgattgcagcagagcgactcctggccggtggtgcgtccgtactgtatcgacaccgtcggcaattccggccattggtttggtttctgaggtaacaggtccaagagaagtagaagcaaaggtccactcaagatgttttacgcgggatatggttaccatgctagtaattntgagcaaacgtaccgctgctatccagcatctttttttga

SEQ ID NO: 9910 - DNA, 376 bp, Triticum aestivum
  Clone ID: uC-tsrow189081d06b1
gcggggatgatgatggacctgggcgccgcgcgcgcgacgccgccgtcggcgcatgaggcggccgaggccgccgtgcgcgcggtcggctgcggctacgacctcgccgacgacctccgcctcttccgcgccaaggaccgcctgctcgacctcggcggcggcggcgagcgggacctgtgcctgccgggcggggccgtggtgaccagcgtgcccgcgggggtcgtcgccgacaagggcgagcgcgcgcggttccgctccgacgtgctctccttcacgcagatggcggagcacgtgaaccagtcgctgtcgctgacgggcaagatcccctcggggcccttcaacgccatgttcgactaccgcggctgctggcaccgggacg

SEQ ID NO: 9911 - DNA, 120 bp, Triticum aestivum
  Clone ID: uC-tsrow189081d07b1
tcgttcacgcgtacgccctacccccatggcggcctcgctcctatcgcgcgcaggctcggccggattcgccctccgcggcggcgcccggatactgcgcaagggcagggacggatgggcgcg

SEQ ID NO: 9912 - DNA, 349 bp, Triticum aestivum
  Clone ID: uC-tsrow189081d08b1
tcgttagcgcgcgaaccaccaccatgtgcccttgtcccgtatgagccagaatcgttgtcgcaagctcacgggcgcccgcaccaccaatccaccacagcacagcgcaggcggctttcagattcggctggcgctcggagcactgaagagcacagggaagaagaagaagaataagaagaagagctctgggagagcgggggcgatggtggcgcagaatcagaggacgccgggagaccaggtgttctggcccaaggtggtgctcaagaaatggctcaacctcaggagcaaggacgccaagttcaacgccgacgaggacgacggcgacgacgacggggagcaagaggagagctgc

SEQ ID NO: 9913 - DNA, 280 bp, Triticum aestivum
  Clone ID: uC-tsrow189081d10b1
tggtagctgactcaactacctactaggttgaggttcttgtttattaacctttagttacccggcgccatggggatccttcatacagtactgccaggcagatttccaagccaagaaacggaccaacagctggctaatcggcgccgatactggtcatggccgacgcgagtttcatcaaggcgcccgccgggcagaatcccaggctggcaatccacgctccggggaggggcacccgggtggtcaggtgctcgcttggcgcggacgtaggcggccggaccgagtg

SEQ ID NO: 9914 - DNA, 330 bp, Triticum aestivum
  Clone ID: uC-tsrow189081d11b1
tggtcaatccagccccccctccgatctcgccgagaaatcttctccgatcgaagcgaagccaaggctctctcgtcctcctccccaagatgcagatcttcgagaagacccttaccggcatgaccatcacccttgaggtcgagtcctctgacaccatcgacaacgtcaaggcaaagatccaggacaaggagggcatccccccggaccagcagcagctcatctttgctggcaagcagctcgaggatggccgaacccttgcggactacaacatccagaaggagtccaccctccacctggtgctcaggctccgcggtggcatgcagatcttcgtca

SEQ ID NO: 9915 - DNA, 398 bp, Triticum aestivum
  Clone ID: uC-tsrow189081e01b1
caagttcaataatgtctatgtttagaacctagctgagactaccactgaagatgacttgaaggaaatctttgggaagtttggagcaataacaagtgttgttgtaatgcgggatggggatggaagatccaagtgttttggatttgtgaattttgaaagtccagatgaagctgctctggctgttcaagatttgaatggcaagaaatttagtgacaaggaatggtatgttggaagagcgcagaaaaagtcagaaagggagattgaattgaaagagaagtttgaaaagaaccttcaagaggcagcggataagtatcagaacaccaacttgtatctgaagaacttggatgatactgttgacgatgaaaagttgcgtgaactttttgctgagttcggaactatta

SEQ ID NO: 9916 - DNA, 404 bp, Triticum aestivum
  Clone ID: uC-tsrow189081e02b1
gtattatcatcaacatgtactccattggaggctcaatcggctatgcaggctccgcaatttatgctaccacaaaaggtgcaatgaactaacttacaaggagtttggccaccgagtgggcctctgacaagattcgtgtgaatggcatcgccccaggatttgtcacaaccgacatgcttaaagatatagatacagagtacgtgaaggaagagcactcgaagaccccattgggacagagcggcaagccggtggagatagcctctgcagtgtcatttttgtgtatgccggcagcttctttcatcaccggccagatcatttgcatcgatggtggtcgaaccattagtgcttagccatcaccaccgttccataagttattgaatatttggcgaataccaccgtgggagagt

SEQ ID NO: 9917 - DNA, 406 bp, Triticum aestivum
  Clone ID: uC-tsrow189081e03b1
ttcctactccttctccgtcgccttcctctactggttctacgacttctcatgaactcctcgcccctcgagaacgccgcatccatccagcctctagttgattagtagatccagcctcgtttcttccacgttcttgccttactccttcccgccatccaagaaaagagaatttccttttctggttcttggatcaagaacccgaccggccatgtcgtcgccgtcgcgccggagctccagccccgagagcaacatcgacggcggcagcggcagcggctccgccggtgacgagcgcaagcgcaagaggatgctccaacagggagtcggcgaggcggtcccgcgcgcgcaagcagcagcggatggaggagctcatcgccgaggccagccgcctccaggccgagaacgcgcgcgt

SEQ ID NO: 9918 - DNA, 64 bp, Triticum aestivum
  Clone ID: uC-tsrow189081e05b1
cgtggcggcagccccttgtttgacctacccttggattctggcctgagcttgtacggcacggggg

SEQ ID NO: 9919 - DNA, 417 bp, Triticum aestivum
  Clone ID: uC-tsrow189081e06b1
tttcagcgctcacccagtaagctaacgaacccgaccacccccctctagctcggcagccatgaactgcggaaggggtcccgctccggcgacgatggtgcgctgcaggcagtgcagcgccagcgtcgccgcgccgcccggtgcctgtgccgtccagtgcgcgcagtgctgctgcgtgactcgcgtcggcggggctgggcgacagctcagtgtgatgcgccccatcccgaacttcggcggtggccgcggcaagaagcgcgccgtgctcgtcggtatcaagtacaccaagacgcgtgcctgcgagctgaggggtcccatcaacgacgtcaagtgcatgaggtacatcctcaccgagcgcttcggcttcgccaacgactgcgtgctcatcctcaccgatgaggagagggacccgtgcaggca

SEQ ID NO: 9920 - DNA, 466 bp, Triticum aestivum
  Clone ID: uC-tsrow189081e07b1
tcgttcagctcagcctaccttcagttctgacggcgtcgcccatggatcctcaggcacagctataattgagagtttatccagatcgatgaacctcgagcaagcggccgtgacccacatcacctgacctcgagcaagcgaccgtgacccacatcacctgaccttgacccacatcgaacaagagtgcaaatcgaccatgacgtccagcctcggccacaagtatttcttcacccaccgctgattgtgatgattgggttgccatcatgattcatagaggataagcaccagcaacgaggaactgggaaggagaggttgatacttgagataggttctacgatagcaatggtggtggcagcgtcttgcaattcacataaatggggtggagaatagcaaggattaatcttcaaatccaactagccaacacttcacaatgtatggctacgatggtggcagaatggaggagctcatt

SEQ ID NO: 9921 - DNA, 404 bp, Triticum aestivum
  Clone ID: uC-tsrow189081e08b1
tctttcacgcgtccggcaaaacgatagaggcgtatccactatggcggcaacctactgcgcctaccccgccgcctccgccgccgccgccgcaaaccctaccagacgccgcctgcaaaccctaaccgcgccgggcgccctacctgctgctcggaaacccagccgccaacccccctccttcctctctttccggcgccccaatgcagcgctgccgccgctccgcgtcgctggcgctgacccgcaggttgtaaatggcgaagatttccctcctatgaatgacctaattcgactatacaagaaagcctttctagatggaaacgaagatgttgttagtgacatcgagaaggcaatcactagcatggaggaagagagaagtaaagcagcttctcagtttgaaagtatcacag

SEQ ID NO: 9922 - DNA, 447 bp, Triticum aestivum
  Clone ID: uC-tsrow189081e09b1
tttgttcactcgccgccgcttccagccgcccccctcaccctccgcaaagcccatagacaagttgatctcatgtattcaggaagaacagtggcatccagagtttcctgttcatcgggaaacaacggaagcttcccaccctgccttcacccgggattccttggatttcctgttgtctccgtgaacttccacttgttcaaggccattgttcgcagccctgcatcttctgttgtcttgggtatttgtggaaggagcctcccttagacagagctgccccataaggtgttcattctatatttctgagaattggtagtgggaagccgtgcagctaccgctagctttcatcaagattctcaaagtgttgaatcttggttcctgaagatggtttcctctgagataccttcagttacaacaacccatacacaacgccccaagctctttacagggatg

SEQ ID NO: 9923 - DNA, 329 bp, Triticum aestivum
  Clone ID: uC-tsrow189081e10b1
taacccaaagaagccctttgctgccattgttggcaacacctaggactcatctaagattgttgtgatcgagtctctgctggccaaggttgatatccttatccttggtggcggtatgatcttcacattctacaaggcccagggattagctgttggaaagtctcttgtggaggaagacaaacttgaactggcaacttcactgatcgaaacggcaaagttcaagggtgttaagctcttgcttccgactgatgtcgttgtggctgacaagtttgcagcagatgccgaaagcaagattgttcctgccactgctatccctgatggttggatgggtc

SEQ ID NO: 9924 - DNA, 448 bp, Triticum aestivum
  Clone ID: uC-tsrow189081e11b1
tttttacacaacacaacacagagacacacaagagcagctagcagcaagagacgagcgcagcagataaggtagcgacctcccacctgtaaacaggttcgtgccttctgtaaagaaaatctttggttcaccagctctcctggctgcacgtacctagctcaagctcgagggcaccggccatgtcgcccgtgcacgtcccggagctcagcagcggcgggtcggggtcggggtcggggtcgctcaccctgaaccccgtgcagcgcgcgctcacccggctgtcgtcgtcgtcggccctcacgcccaggtcgcccccgccgtcctacgggagcatcgtcaccgtgctcagcatcgacggcggcggcgtccgcggcatcatccccggaaccatcctcgccttcctcgaagagaagctccaggagctcgatgggccggacgtgaggatcgcggatta

SEQ ID NO: 9925 - DNA, 94 bp, Triticum aestivum
  Clone ID: uC-tsrow189081f01b1
gatcaacatggcctccattggaggctcagtccgatatgcaggctctgtaatttatgctaccacaaaaggtgctttgaactaacttacaaggagt

SEQ ID NO: 9926 - DNA, 450 bp, Triticum aestivum
  Clone ID: uC-tsrow189081f02b1
tttattcgtgggcaaggagggcattcccccggaccagcagcgtcttatcttcgccggcaagcagcttgaggatggccgcacccttgcggattacaacatccagaaggaatccaccctccaccttgtcctccgccttcgtggtggcatgcaaatctttgtcaagaccctcaccggcaaaaccatcaccctggaggttgagtcctcagacaccattgacaatgtgaaggccaagatccaggacaaggagggcatccccccggaccagcagcgcctgatctttgccggcaagcagctcgaggatggccgcacccttgcggattacaacatccagaaggagtccaccctccacttggtgctcaggctccgtggtggcatgcagatatttgtgaagaccctcactggcaagaccatcaccctggaggtggagtcgtctgacaccattgacaacgt

SEQ ID NO: 9927 - DNA, 348 bp, Triticum aestivum
  Clone ID: uC-tsrow189081f04b1
tttacgcgtgggttgcgggcgtgttcccgtgggggaactgatggtgggttacatggagtggtcgcacgactggctgctgtgggacgccttcttggaatgcggagggatccggaggccgtccattagatagcggccggggaggagggaggagcggaggaccacgaggaggaggaggccgccattagcacccaccctggctgccacccaccaccccgacgcccgactcgccactcacctgacggacggtcatgggggaggacctcgtcaccaccctgtacatggagaacggcggcggcgaaggtcaccacagactctgcaccctgctctccatggacccctacggccacc

SEQ ID NO: 9928 - DNA, 75 bp, Triticum aestivum
  Clone ID: uC-tsrow189081f05b1
ttgttgtgcttacccagtcagctaacgaacccgcccactccactctagcttggcagccatgaactgcggaagggg

SEQ ID NO: 9929 - DNA, 431 bp, Triticum aestivum
  unsure (1)..(431): unsure at all n locations
  Clone ID: uC-tsrow189081f06b1
gtatttggctcccagaagtctgcaaacctgacaggatcgcagccgggcacgcctttgtcaggggggactatggctggtggaagtggaagtcaaggagcagaaggaactaaccaacttctcgggaagagaaaaatacaagatttggttgcacaggtggatccccttggcaaacttgatccagaagtggaagatttggttttagagattgctgatgacttcattgaatcggtgactgcatttgcatgtaccctggcaaagcacaggaagtcatccgttctggaagccaaggatgtgttgctgcacttgcagagaaattggcatctgacggttcctggtttttcgaaggaagacangaatccacagagaaattatgtaaaggcaagtagtggatcctcaacagccagagtgtgatgctgctggagttagaagcg

SEQ ID NO: 9930 - DNA, 444 bp, Triticum aestivum
  Clone ID: uC-tsrow189081f08b1
ctctcccccgatccccaaccattctccggcgaacccgccccatccgccgtgcttgggtagatagatggagggcctggcggaggcggggagcggcggccatctcgcgcctctcctcgacggcgtcggcggcggcctggacgcggccctcctccgccgcctctacgccggccacttcctcgcccgatggggcgcgcgcatgtgggagttctcggtggggctgtacatgatccgcgtgtggccgggctcgctgctcttcgccgccgtctacggcgtcgttgagtccgcctccgtcgccgccttcgggcccatggtcggcaccctcgtcgatagcctcacctaccttcaggttttgggcctgtggctactagttcaaagctcatccttcatcgttgccggagtctccgtaaccgcgctgctggtatacgatgacctgaaagtgacgag

SEQ ID NO: 9931 - DNA, 337 bp, Triticum aestivum
  Clone ID: uC-tsrow189081f09b1
tcgctacccaaagaagccctttgctgccattgttggcagctccaaggactcatctaagattgttgtgatcgagtatctgctggccaaggttgatatcctcatacttggtggtggtatgatcttcacattgtacaaggcccacggattagctgttggaaagtctcttgtggaggaagacaaacttgaactggcaacttgactgatcgaaacggcaaagtccaagggtgttaagctcttgctttcgactgatgttcgtgtggctgacaagtttgcagcagatgccgaaagcaagattgttcctgccactgctatccctgatggttggatgggtctggat

SEQ ID NO: 9932 - DNA, 415 bp, Triticum aestivum
  Clone ID: uC-tsrow189081f10b1
aatggaagcaatacatattatgtacagaattattcaggagttttttagccacatccaaatagcgtgtggcagacatgcatggcgtagcaaatttagcaaatgcacaagttatacagcaagcattctgttgcggcttcgcatcttcgctgctgataccacaacgacgatggagcctagccgactactaggtattaaagtttctttctagcgatacaccgaaaccaagatcgactccaggagggctgccgatcacatcagaacagagcctactcctccttcgaggcgtgcgtggcggacaccgtggagaccatggagtcgacgccgcacttgtttcgcacgttggagcccctgcagatcttgtagtaacccttgtccccccagttctcgccccatgagttcttgatgatccagtagg

SEQ ID NO: 9933 - DNA, 409 bp, Triticum aestivum
  Clone ID: uC-tsrow189081g01b1
gttgttcacatgaaaggagttaccatcggatacgtggcctgcaacaaggaattgattggggtattcagcctctcggattcttgccgaactgggtcagccgaggccatcaaggagttgagatcactgggcatcaagtcagtgatgcttactggcgatagtactgccgctgccacacatgcacagaaccagctggggaacatactagctgaggttcatgctgaacttctgccagaagacaaagtgagaattgttgatgaactgaaggcaagagatggccctacactgatgattggcgacggcatgaatgatgccccggcactggctaaggctgatgttggagtctccatgggcgtgtccggttcagccgtcgcaatggagacgagtcacattactctgatgtcaaacgaca

SEQ ID NO: 9934 - DNA, 409 bp, Triticum aestivum; identical to SEQ ID NO: 9933
  Clone ID: uC-tsrow189081g02b1

SEQ ID NO: 9935 - DNA, 390 bp, Triticum aestivum
  Clone ID: uC-tsrow189081g03b1
cccattcgtccgcgactaccgccatatggacggcttcggcgtcaacacctacaccttcgtctcccgcgccggcaaggcccactacgtcaaggtccactggcgccccacctgcggcgtcagctgcctcatggacgacgaggccaccctcgtcggcggcaagaaccacagccacgccacccaggacctctacgactccatcgacgccggcaacttccccgagtggaagctcttcgtgcaggtcatcgaccccgacgacgaggaccgcttcgacttcgacccgctcgacgacaccaagacttggcccgaggacctcgtccccctccagcccgtgggacgcctcgtgctcgaccgcaacgtcaacaacttcttcaacgagaacgagcagctcgc

SEQ ID NO: 9936 - DNA, 386 bp, Triticum aestivum
  Clone ID: uC-tsrow189081g04b1
ttcacgcgtccgcgactaccgccatatggacggcttcggcgtcaacacctacaccttcgtctcccgcgccggcaaggcccactacgtcaagttccactggcgccccacctgcggcgtcagctgcctcatggacgacgaggccaccctcgtcggcggcaagaaccacagccacgccacccaggacctctacgactccatcgacgccggcaacttccccgagtggaagctcttcgtgcaggtcatcgaccccgacgacgaggaccgcttcgacttcgacccgctcgacgacaccaagacttggcccgaggacctcgtccccctccagcccgtgggacgcctcgtgctcgaccgcaacgtcgacaacttcttcaacgagaacgagcagc

SEQ ID NO: 9937 - DNA, 422 bp, Triticum aestivum
  Clone ID: uC-tsrow189081g05b1
tttgttcccggggactacttctccggcatgccggtggtcgacctctccagccctggcgcgccgcgggccatcgccgacgcgtgcgagcgcttcgggttcttcaagctcgtcaaccacggggtgcccgcggacactatggacaggctcgagtcggaggccgtcaggttcttctcgctgccgcaggccgacaaggaccgctccggcccggcctacccgttcggctacggcagcaagcgcatcgggctcaatggcgacatggggtggctcgagtacctgctcctggccgtcgactccgcgtcgctctccggcgcctgcgccgtcccgtcctgcgcgctcttccgggcggcgctgaacgagtacatcgcggcggtgccgaaggtggcggtgcggctgatggaggcgatggcggaggggctgggcat

SEQ ID NO: 9938 - DNA, 413 bp, Triticum aestivum
  Clone ID: uC-tsrow189081g06b1
caaagagtagctataaatggcgatggctaggacaccgacgctcctcctcatcgtcgccgcggctctcctcgcggcctcatgcagcgcatgggaggccaacatccggatgccgacgtccgtggacgaggcggtggtggcgccgctgatccacgcgctccggccgctgctgggctccggcaagcacgccggagtggagtgcgacagctgggtgctgggcgtggaggcgcacaacgtgcgggactggaagacggtgcccgccagctgtgagggctacgtcggccactacatgctcggtaagcacttccgccgtgactccaagatcgtcatcgaccaggccgtcgcctacgtcgacagcctcaagctcgccggcaacggcaggaggtggtgggtcttcgacatcgacgagaccaccc

SEQ ID NO: 9939 - DNA, 423 bp, Triticum aestivum
  Clone ID: uC-tsrow189081g07b1
tgttatcaatccccaccaagaaggagcaggtcttctccacctactctgacaaccagcccggcgtgctcatccaggtgtatgagggcgagagggcgaggaccaaggacaacaacctgctcggcaagttcgagctctccgggatcccaccggcgcccaggggtgtcccccagatcaccgtgtgctttgacattgatgccaacggtatcctgaatgtctcggcggaggacaagaccaccggacagaagaacaagatcacaattaccaacgacaaggggcggctgagcaaggaggacatcgagaagatggtgcaggaggccgagaagtacaaggctgaggacgaggagcacaagaagaaggtggactccaagaacgccctggagaactacgcttacaacatgcgtaacaccatcaaggatgacaaga

SEQ ID NO: 9940 - DNA, 424 bp, Triticum aestivum
  Clone ID: uC-tsrow189081g08b1
tcgttatcaatccccaccaagaaggagcaggtcttctccacctactctgacaaccagcccggcgtgctcatccaggtgtatgagggcgagagggcgaggaccaaggacaacaacctgctcggcaagttcgagctctccgggatcccaccggcgcccaggggtgtcccccagatcaccgtgtgctttgacattgatgccaacggtatcctgaatgtctcggcggaggacaagaccaccggacagaagaacaagatcacaattaccaacgacaaggggcggctgagcaaggaggacatcgagaagatggtgcaggaggccgagaagtacaaggctgaggacgaggagcacaagaagaaggtggactccaagaacgccctggagaactacgcttacaacatgcgtaacaccatcaaggatgacaaga

SEQ ID NO: 9941 - DNA, 418 bp, Triticum aestivum
  Clone ID: uC-tsrow189081g09b1
ttctgtctgccgctgttattactccgtccaatgcagcctcattcctgtcaagtttcactcagctgcgccgccgtcgtttaccttcagtgccgctacacccagctactcgtcctgcggctgttgtagctccatgtggaggcgtgccggaggagcggcccagctgctactacaggaggcgacacgctgagcttccacttgctgaggctacacccagatcgacaacacatcttctctgccattggtcacatccatctatctgagagaaaaattatctgacaacaatggcgatggtgctggatgcatttgtgtcctacctggtggacatgctcacgcaggcagcaagagatgaggtgaagactatgttgggcgtctccggcgagatcgacaagatgggagacaagcttcgagacctcaagaa

SEQ ID NO: 9942 - DNA, 64 bp, Triticum aestivum
  Clone ID: uC-tsrow189081g10b1
ttcaagctgagcgagttattgcttcttgcattgcaagctccactgtgcatgacccgactaagat

SEQ ID NO: 9943 - DNA, 405 bp, Triticum aestivum
  Clone ID: uC-tsrow189081g11b1
ttatcgcgtccgctccggcgtgggcgaccttcctcggctatcgtccccgcgtcgccctccacatccaccttttcttctgttccgacgcagccatgaattacatcatcggcgccttcaagccgccctgcgacatcttcgtgaccttttccgatgagaggagccggaagcaggttgcagtcaagaaggataatgggaagacaaccatggtgccggcgttccagagcctggagaccatagccggagaggtatcaatagcgcctgttcctggtaaaaggattgagcacatgggtgttaagattgagctgcttggacagatagagttgtatttcgacagaggcaacttctatgacttcacttcactggggcgtgagttagatgttcctggtgaaatatatgaaagaaaga

SEQ ID NO: 9944 - DNA, 319 bp, Triticum aestivum
  Clone ID: uC-tsrow189081h01b1
gtagaacacatgaaaggagttaccatcggatacgtggcctgcaacaaggaattgattggggtattcagcctctcggattcttgccgaactgggtcagccgaggccatcaaggagttgagatcactgggcatcaagtcagtgatgcttactggcgatagtactgccgctgccacacatgcacagaaccagctggggaacatactagctgaggttcatgctgaacttctgccagaagacaaagtgagaattgttgatgaactgaaggcaagagatggccctacactgatgattggcgacggtatgaatgatgccccggcac

SEQ ID NO: 9945 - DNA, 241 bp, Triticum aestivum
  Clone ID: uC-tsrow189081h02b1
ggtttttatttcccgagccgggatgtggcggttgacggcgacgttaggaagtccggagacgccggcgggggcctcgggaagagttatcttttctgcttaacggcctgccaaccctggaaacggttcagccggaggtagggtccagtggccggaagagcaccgcacgtcgcgcggtgtccggtgcgcccccggcggcccatgaaaatccggaggaccgagtaccgttcacgcccggtcgtac

SEQ ID NO: 9946 - DNA, 384 bp, Triticum aestivum
  Clone ID: uC-tsrow189081h04b1
catcttattcgagagagagccgcagacatcaggaagatcatcaacctgagaaacgacgcgggcctcaccgccctgcacatggctgtggttggctgcgtgcacccggacctcgtcgagctcctgatgaccacgccgtccatcgaccttaacgtcgaagatgctgacggcatgaccccgctggcgctgctcaaggagcagctgcgatcaaccacgtcggagaggctcatcaagcagatagtctccgccggaggggtgctgagctcgagcgtgctgagaagccggtcggccgtcgtttcgcagataaagatgcggggagggattgcgatcagtccgggcaccatgttcaggatatcggatgcggagatattgttgcactcgggcatt

SEQ ID NO: 9947 - DNA, 210 bp, Triticum aestivum
  Clone ID: uC-tsrow189081h05b1
gtgatgttgatctgcactactcgatgcaagaaccaccaccacacgtgagtgaacgtgcgagcaaggaaaggcagggagagatggcaatgaggccgctcgtcgcgctgtctatacccgcggccctgaccggcgtggcgctgcgaggaggccgcacctgacggggccgttgagtgcgggaggtcctcctccgaccggatggccctgcgcatg

SEQ ID NO: 9948 - DNA, 417 bp, Triticum aestivum
  Clone ID: uC-tsrow189081h06b1
ttgccttacccacacccatacaagaggcaggcaaggggcaccctcctcaagcctcaagcaaccaacgcagttcttccaccgatatttccttccctcgccggcaccgccgacgatctgcagccatggcaatggcttacaagatggcgacggaggggatgaacatcaaggaggagtgcaagcggtggttcacggagatgaagtggaagaaggtgcaccgcttcgtggtctacaagatcgacgagcggacgcgcgccgtgctggtggacaaggtgggcggccccggggaggggtacgacgagctcgtcgccgcgctgcccggcgacgactgccgctacgccgtcttcgacttcgacttcgtctccgtcgacaactgccagaagagcaagatcttcttcatcgcatggtcgccggcggcgt

SEQ ID NO: 9949 - DNA, 298 bp, Triticum aestivum
  Clone ID: uC-tsrow189081h07b1
caatccccaccaagaaggagcaggtcttctccacctactctgacaaccagcccggcgtgctcatccaggtgtatgagggcgagagggcgaggaccaaggacaacaacctgctcggcaagttcgagctctccgggatcccaccggcgcccaggggtgtcccccagatcaccgtgtgctttgacattgatgccaacggtatcctgaatgtctcggcggaggacaagaccaccggacagaagaacaagatcacaattaccaacgacaaggggcggctgagcaaggaggacatcgagaagat

SEQ ID NO: 9950 - DNA, 279 bp, Triticum aestivum
  Clone ID: uC-tsrow189081h08b1
ttgatcccacccaccaccccgccggccaagatgttcggccgcgcccccaagaagagcgacaacaccaagtactacgaggtgctcggggtgcccaagaacgccgcccaggacgacctcaagaaggcctaccgcaaggccgccatcaagaaccaccccgacaagggcggagaccccgagaagttcaaggagctggcacaagcctatgaggttttgagtgaccctgagaagcgtgagatctatgatcagtatggcgaagatgctctcaaggagggaatgggt

SEQ ID NO: 9951 - DNA, 371 bp, Triticum aestivum
  Clone ID: uC-tsrow189081h09b1
tcggtcaagctgagttagttcttgattcttgtattggtagttccactgtgcatgacccgtctaagatgtctgctgagctttgcattggtgaatcttgcacttctatgttacagttgatgaagaggtatctccgattggcaacaactaatgcatcatggactgcgaacaattcttttgcagtctacccgtattattatggggcttactttacttcgggtgtggcattgagtggcaccacaggctatattactggtgattatgtggggcttttggcttcatgttatgcccattctcgtggagccctgaggtatagatggatgaacggtcaaaccactgcttcgggtacgatcactaagattataccctatgat

SEQ ID NO: 9952 - DNA, 227 bp, Triticum aestivum
  Clone ID: uC-tsrow189081h10b1
tcgctgacgcgtgggacctgctgcttcctacacacacattgcaaagcacaagtaagaagcctgcaaagagagggaatgggccaagaaggggcagctgcttcgttgctggatgggaagcttaaggcgaggagaaacgattatggccaccgaaaggccgcagcagcaacaaggaaaaagaagtggtggccgtgccttttggatgccgaggaagccgcggggcaagtggc

SEQ ID NO: 9953 - DNA, 365 bp, Triticum aestivum
  Clone ID: uC-tsrow189081h12b1
ttcgttacgcgtccgcccacgcgtccgcggacgcgtgggtggatcgcaagaacagggagaaagagatggcatccgttctcctatcctcattaagcatggagctattctccagtgaagacatcgtcaagggattcataatgcttcttgaatctgcagaagatactgcactggacatattggatgcctcagatgagctgggactgttcctagcgagggcagtgatcgatgatgtgcttgcgcctctgaacttagatgagattggcagcatccttccaccaagctgcagtggggctgaaacattgaacatggcgcgctcgcttgcctccgcccgccactcaggagagaggctactgagatgctggggc

SEQ ID NO: 9954 - DNA, 366 bp, Triticum aestivum
  Clone ID: uC-tsrow189085a01b1
ttgttattttccccacctctgtccgaggcatgtgcatagccatctgcgcgctaacctgctggatcggcgacatcatcgtgacatacactcgtcccgggatgctgaatgccattggtctcgctggagtcttcggcatatatgccatcgcttgtgtactagcctttgtattcgtatacatgaaggtccctgagacaaagggcatgcccctggaggtcatcaccgagttcttctctgtcggggcaaagcaaggcaaggaagccacggactagttgctctgatccggtgatccgcgtcgctgggggtaattttgtggtgtcataactactactacactggttaacctgcgatgttttggtgaagaaactt

SEQ ID NO: 9955 - DNA, 401 bp, Triticum aestivum
  Clone ID: uC-tsrow189085a02b1
ttcctatccagcccccctccgatctcgccgagaaggctccgattgaagcgaagcgaagccaaggctctctcctcctcctgctaagatgcagatcttggagaagacccttaccggcaagaccatcacccttgaggtcgagtcctctgacaccatcgacaacgtcaaggcaaagatccaggacaaggagggcatccccccggaccagcagcgtctcatctttgctggcaagcagctcgaggatggccgcacccttgcggactacaacatccagaaggagtccaccctgcacctggttctcaggctccgtggtgggatgcagatatttgtaaagaccctgactggcaaaaccatcaccctggaggatgagtcctcagacaccattgataatgtgaaggccaaga

SEQ ID NO: 9956 - DNA, 347 bp, Triticum aestivum
  Clone ID: uC-tsrow189085a03b1
tgcattgttcgcactggccatagtcatggccgtggtggctgacgtctcggcgcagaacaccccgcaggacttcgtcaacctgcacaaccgcgcccgcgccgtggacggtgtcggcccggtggcgtgggacaacaacgtggccaggtttgcgcaggactgggcggcgcagcgcgccggcgattgccggctccagcactccggcgggccgttcggcgagaacatcttctggggttccgggcagtcgtggacggccgccgacgcggtgaagctgtgggtggacgagaagcagaactaccatcttgacagcagcacctgcgacgccggcaaggtgtgcgggcactacacgc

SEQ ID NO: 9957 - DNA, 303 bp, Triticum aestivum
  Clone ID: uC-tsrow189085a04b1
tccactcgtccggaacaagagcaggaatatatccatccatatacagcagcaagcataccttcctcgcctttctccttgaggttcatcgcagaaacaagaaactcgcagccatggacagatctgctgtttctcaggcccttccggtgcaccaggaagacgaggacctgttcgagacctgctcctgcttctcctgcgactccgacgacgaggcccagttctcagacggcgaggaccagtttgtgccggcttccccgccggtgcggagactcaactctgacagcgtctacgatctgtcgtccatga

SEQ ID NO: 9958 - DNA, 325 bp, Triticum aestivum
  Clone ID: uC-tsrow189085a05b1
ttctcgcgtccgcaggagcgagtcccttctagagagccccttgagagtcgcctgtagcttccccgatcccgcccgatccccaatctccgacgacggcgatgccggccggacgagagatgggagaggtgtgtggagatctgtaaatagcaggtctaggattagatcgagtcttgcccaagtggtgtctggcgctatgccgaggaggagcgcgccgccggcgcacgcgagctgcgcctgggggctagcgtcggcgtttctgatggttgcggaggcgaggtgctgcgtgcaaccggaggaaatgacggcggcgactccttcaataagc

SEQ ID NO: 9959 - DNA, 353 bp, Triticum aestivum
  Clone ID: uC-tsrow189085a06b1
tttttactccccatccgccccacgagaggagagacgattactaagcgtgcccaactccatctgcttccttttcctcttccccccgtccccgacgacccccggccgaaaccctagcgaggcgcgatgttcgggtaccggaaggcgccggacctcgacctcgaggcgggcggctcggcggcgctctacccggggatgacggaggacgtggagctgcgctgggccttcatccgcaagatctacgtcatcctctcggtccagctcgccatgaccgccgccgtcgcggggttcgtcgtcaaggtccccgccgtctccgagttcttcgtctcctccaacgctggcctgggcctctacat

SEQ ID NO: 9960 - DNA, 321 bp, Triticum aestivum
  Clone ID: uC-tsrow189085a07b1
gcggcagcttttccagcggctcacgcatgggcgttgccatctgcaccgatcccccctccacgcgctaccgcgatggccgccggcggcagcggcggtggcggagacatcggggctgattccgagcggcgcctcaagaaggctatggacaagctctaccacttgcccaagcccaagcctagccccagccccggctccaaaccctgctgctcgtccactcccagctcgtggagggcggggaaggcggcggatgccgggaggaggttcggggttgtgcgggggtcgcggctcccgccgcagatggccgccatgtcagcgatgtct

SEQ ID NO: 9961 - DNA, 452 bp, Triticum aestivum
  Clone ID: uC-tsrow189085a08b1
ctgacgcgtgggtcgctcaatgcaagaaggccataccttcccgagaaatgggaggaaaagtgatcatcatagacatagtgcttggatcttctctagagacaataactgaaaccgaactgctgatggacatgctgatgttcatatgtaccagaggacggcaacgggatgaaaaggagtggagcacgatctttacgaaagcagggtttagcaactataagattgtcaagaaacttggccatcgaggtgtcatcgaggtctatccataaggttggtgcagatgcccatctggtgtgtgttctatatgaatagtagtgtgaaataagaaataaataagtacagtgccttactcgtcaatggaaaatgcaacaaattcttaagtagacgaagtggtaaggggccggtcgcttgagaactgtatgcacgtaaccactcatatgtatgtatgtatgtat

SEQ ID NO: 9962 - DNA, 379 bp, Triticum aestivum
  Clone ID: uC-tsrow189085a09b1
ttcagcttatccaggaaggcagcagcgccaagaaccagcaacaaaacccaagcaagcgtaggagaagggaggagaagagagaacctattctccccccactcccactcctcgcctcacttggagagtcgatcgatcgatccgcgggcacaatgttccaagggtgcggcctgttcgcgtgcgtgagccggcgcggcgcggacgtcaggaagcgcggggaggcgggcgcggccagctcgcgggtcgcggcggagccggcggtgtgggaggaggaaggaggccgactgcgccgccaggcagatggcgtgggcggaggtagagtccgccacgggggccttctcgtcccgggtcatcggccacggcggcttcagcaccgtctacc

SEQ ID NO: 9963 - DNA, 420 bp, Triticum aestivum
  Clone ID: uC-tsrow189085a10b1
tccacgcgtccgcccacgcgtccgctaagtctgttgacacaaaatcacaagaaaagcatcaagaaagaggcctgctggactgtttcaaatatcactgctggtaacaaagatcagatacaggctgtgattactgctgggattattggacctctggtgcatctgctgcaaacggctgaattcgatatcaagaaggaggctgcttgggccatctcgaatgctacctccggtggttcccatgaccaaatcaagtatttggttagcgagggctgcatcaagccactgtgtgacctcctgctttgcccagatccaaggattgttactgtttgcttggagggtcttgagaacattctcaaagttggagaaactgataagaatttgggtgcttctggggaggggaatgtctatgcgcagatgattgat

SEQ ID NO: 9964 - DNA, 289 bp, Triticum aestivum
  Clone ID: uC-tsrow189085a12b1
ttttaaatgcacgagcaactcggcctgctccgggaagcctgtgaccgtggtcatcaccgacctgagccccggcaacctctaccccggcgagccgtgccacttggacatgagcggcaccgccctgggcgccatggcgaagcccggcatggccgacaagctccgcgccggcggtgtcatcaggatgcagtacaagagggtgccatgcaagtaccccggcgtcaacattgccttcagggtggaccagggcgccaaccccttctacttcaagaccctgatcgagttcgaggac

SEQ ID NO: 9965 - DNA, 298 bp, Triticum aestivum
  Clone ID: uC-tsrow189085b02b1
gtcacggcatcctgcagaagctgacgccatgggcggacgggccgagcatggtgacgcagtgcccgatccagcccaacggctgctacacgtaccggttcaacgtgacggtgcacgagggcacactgtggtggcacgcgcactcctccttcctgcgcgccaccgtgtacggggccctgatcatccgcccccgaaacggcaccgcctaccccttgccggcgccggaccaagaggtccccgtcgtacttggcgagtggtggagccagaatgtcgtcgacgtcgagaaggacgccgtcatggc

SEQ ID NO: 9966 - DNA, 268 bp, Triticum aestivum
  Clone ID: uC-tsrow189085b04b1
ttattatgaacttactgacctgagttctgattatgaagtcctgggaaaagacactacatcgtgaaggagggagcactggcctgtaacgaggtagtcgtgcaaaagctgagaagatgggttcaacatcctgcccttctactaaatcagatcatagacacaaagctggcaacttgaatgaagccgttatagaagctcctatgcccaacaagtcctacatagtgccccaagcaggggcgacaaatgttactgtgcatcaggaggagaaagt

SEQ ID NO: 9967 - DNA, 419 bp, Triticum aestivum
  Clone ID: uC-tsrow189085b05b1
tgggcagggccctcaaactcgtgacctttacgaggggggacgtgacgggcgcggggaggccgccgtctccggtgggctgcggcggaggagcagaggacaggaagagaggggaggtggcggtggagatggagagcgaggaggccgcggagaggtgggggcacgccatcagagatcgcttcgcctcgcttggttgttaatggtctgctccaaagagatgattgggacaaagcaataaaagtgccactagggatcattccagcaggtactggaaatggaatggtgcaaggtctattgcattctgctggtgaacccttctcaatgtcaaatgctgtgtttgcaatcatcagaggtcacagacgtgccctcgatgtcacttctgttgtgcagggaaagacaaggtttttcagtgtcatgatgct

SEQ ID NO: 9968 - DNA, 393 bp, Triticum aestivum
  Clone ID: uC-tsrow189085b06b1
ttgtcacaaaagtgaactaagaaggccttgagagcttgggcaacgcagacatgtcggccgctgtcactgcaactgtatcggcggtctgtgcgaccgtggcagtagtgataaccatcgtgatgatcagaggatgccgccgttggaggtggaaagtttacaagaagttcatggccaagatctccgacgaggtcaacagaaggaaccgagagctggaagcatgcgctgccgtgaacgatgtggtgatcgagatcggccccgtggagaagttcctccacgagatcctcaacgagaagccgatgaggttcagctcggagcagctggcgtcgtgcaccggggactactccaccgagctcggctccggcggcttcggggtggtctacaagggggagctcc

SEQ ID NO: 9969 - DNA, 393 bp, Triticum aestivum
  Clone ID: uC-tsrow189085b08b1
tcagacctcacgtagagtgacccaacaagtgatacatagactgagcaccaagaagacctcgcaacgatgaggtctctcggccgcacttcgttgtgctttcacctggccctgcttctcctccttgccgtggtcagggcagatgatcctagcctcgccgatggagggaggctcatagaccccaagcctaccccaaaacccattccataactgatgcctcaacccaaccctaaaatgccggacccgaacccaagcccagacccaaacccaaagcccacgacttctgcaatgccggaacccaacccaataccggacccagatgccaagccacaaccaaaaccaatgccttagtctgacccgaagccaactgctgaaaagccaaagcctgaacctcag

SEQ ID NO: 9970 - DNA, 440 bp, Triticum aestivum
  Clone ID: uC-tsrow189085b09b1
tgggaaagggactatctcaagacaatactccatcgaatatatggtaaattcatggtgcatcgcccattcatcaggaaagcaatcaacaacatcttctacagatttatatttgaaacggaaaagcataacggtattgcagagctgctggagatcttgggcagtataattaatggttttgccctgccacttaaagaagagcacaaattgttccttctccgtgcactgatcccacttcacaagccaaagtgtgtagcaatgtaccatcagcagctatcgtattgcatcacacagtttgttgagaaggactgcaaacttgctgacactgttattaggggcttgctcaagtattggcctataaccaacagttcaaggaggtgatgttcttgggtgagcagaagaggttttagaggcaacacagcttgcagagttccaaagatgca

SEQ ID NO: 9971 - DNA, 274 bp, Triticum aestivum
  Clone ID: uC-tsrow189085b10b1
tccacgcgtccgcccgcactcgagcctccgcccgcactctctgctctcttccccgatcccctcccatgaaccctagcatcctggtgcagccacccctgccttcccccgtccatccccacccctcccccgcgccgcgagcccttccctcctgttcgtcgccactgctgtctctcctcttcctccccgctctagcccctccaggtcgtcgctcgcggtggttccagatcctgcgctggtcgtccccatgggtgaggaggggagggatgggtcttca

SEQ ID NO: 9972 - DNA, 435 bp, Triticum aestivum
  Clone ID: uC-tsrow189085b11b1
tcgttacgctcctggacccggagatggatcagctgatccacgacgccgtcgctgctcacgaccacatggggatcggccccgtgctccggcagtgccgtgagctcttcgaggggcttgagtctctcactgactgcggcggcggtgatgggacgacggccaggtccatcgtcgaggcctacccgcacatcaagtgcactgtgctggaccttccaaaggtcatggacaaagttcttcttcccgctgaagaaggagcggttaagtatgtttctggtgacctgttccacgtcgtcccacctgcccaagccgtgttgctcaagcttgttctgcacttctggagcgacgaggattgcatcaagatcctcgcacaatgcaagaaggccgttcctccccgagaagcaggaggaaaagtcatcgtcatagacattgtgcttggat

SEQ ID NO: 9973 - DNA, 259 bp, Triticum aestivum
  Clone ID: uC-tsrow189085b12b1
tccacgcgttcgattgtccccttgctccgaccgtccatccggccgtccaattcctgctgctgccttgcatcggctggactctgctgcctgctaaatctatctcatctgctgccaacggcctcctggccttatccccagcgcgcaccgaaccggacgcatctcccgcgcgccacacattcctagactgcgcctgctcccacaaccctgtcttctgccctgcccaccccgccccgatttggattcttacgccggccacctc

SEQ ID NO: 9974 - DNA, 377 bp, Triticum aestivum
  Clone ID: uC-tsrow189085c01b1
ttttctccttctgtcccgcaaacccccgagagatcacaccatgttcggcttcggtcaccacggccaccatggccagaaccccccggcccacgctccggccgccgccggcggcaaccagcccaccttcaagatcttctgcaaggctgacgagggctactgcctctccgtccgcgacggcaacgtcgtcctcgccccctccaacccccgcgacgagcaccagcactggttcaaggacatgcgcttcagcagccagatcaaggacgaggagggcaaccccgcctttgccatcgtcaacaaggccactggcctcgccgtcaagcactcgctcggccagtcccaccctgtgaagctcgtgccattcaacccggagtacctcg

SEQ ID NO: 9975 - DNA, 393 bp, Triticum aestivum
  Clone ID: uC-tsrow189085c02b1
ggacttggggttgggcttgagtactggcgcgtcttcgacttcctctcccaccaccccgagagcctccacaccttcttcttcctcttcgacgacgtcggcatccccaccgactaccgccatatggacggcttcggcgtcaacacctacaccttcgtctcccgcgccggcaaggcccactacgtcaagttccactggcgccccacctgcggcgtcagctgcctcatggacgacgaggccaccctcgtcggcggcaagaaccacagccacgccacccaggacctgtacgactccatcgacgccggcaacttccccgagtggaagctcttcgtgcaggtcatcgaccccgacgacgaggaccgtttcgacttcgacccgctcgacgacaccaagact

SEQ ID NO: 9976 - DNA, 387 bp, Triticum aestivum
  Clone ID: uC-tsrow189085c04b1
tcctcgcgtccgaaagacatgtatgagaggtttgacaaatactggaaagattgcaaccttgtgttagctgttgctgttgtgatggatccacgttttaagatgaagcttgttgagttcagttactcaaagatttacggcgttgaggctgcaaagtatgttaaggtggtaaatgattcggtgcatgacctttttaaggattatgtggcacagccgctccccttaacaccggcctatgctgaacaagggaaaactgataatgctactgccaatgggaacaacacccaagcaactcaaccttcaactggtgatggccttcaagactttgatatatatctttctgagattgctacaacccagccctcaaaatctgagctagagcagtacctg

SEQ ID NO: 9977 - DNA, 366 bp, Triticum aestivum
  Clone ID: uC-tsrow189085c05b1
tcgatatgaatagagcttgatcaagaatgtttcaattgcatcactgaattgattttttcatcttccaacgcgtttgattttgcttgaccttgttgttgacgaatatttattgatgcaagtaattgctcagttttttatgcgtctcaccaagggttatttcatcttcatcttttcatcaatattgttgaaataccgcgtgggtggattttgtatggctctctcacaatttccttctgatgtcccttgatcttccttttgctggtagataattcccatatgaatagagcttgagttttaccatggactttacacgagtttcaaagccacagttccaatcttttttaaaagttttctcataccttaatt

SEQ ID NO: 9978 - DNA, 398 bp, Triticum aestivum
  Clone ID: uC-tsrow189085c06b1
taaaactacagaggaaaacaagtctaccaaggagatgctgttctatgaatcgtctgtgccggcatcaggtgatgaagacaatgtggttcaggaaaagagagaagaaggtgatgtttctgtagagaattcaggccaaccaccatttcaatcaaaaatttggaatgaaaaagaagaggatgacaaaagtacagaggaaaacaagtctaccaaggagacgcattcgcgaggttcctattttcccgaatcgagtgtgccagcatcaggtgatgaagacaaaaagggagaagatcaattctctgtacacaatttaggccaacattcacttttatcggacatcggagataagaaagagcatggcataacaatggagaaaaagaagtctgccgaggacatgccac

SEQ ID NO: 9979 - DNA, 397 bp, Triticum aestivum
  Clone ID: uC-tsrow189085c08b1
tgctatgccaccgatgagacccctgagctcatgcccctcagccatgtgcttgccaccaagctgggtgcccgcctcactgaagtccgcaagaatggcacttgtgcctggctaaggcctgatggcaaaacccaggtcacggttgaatacctcaacgagggaggtgccatggttcctgtacgtgtgcacactgttctgatctccacccagcatgatgagactgtcaccaatgatgagattgctgcggacctcaaggagcatgtcatcaagccggtgatccctgagaagtacctggacgagaagaccatattccacttgaatccatcaggccgctttgtcattggtggccctcatggtgatgctggtcttactggtcgcaagatcatcatcgacacctatg

SEQ ID NO: 9980 - DNA, 393 bp, Triticum aestivum
  Clone ID: uC-tsrow189085c09b1
gctaacgcctgctgcccccaaactcccaactacccgcttactcctgagttctgagcccggtcgatccccgccgcagccaccgacgccgactccgtgaactcgcacggggaacctcgccatggccgccgcgtcgtgcgccacctccgtccacgacttcaccgtcaaggatgcaagcggcaaggacgtcgacctcagcgtctacaaggggaaggttcttctcattgttaacgtcgcatcccagtgtggcttgaccaactgcaactacaccgagctgagccagctgtacccgaagtacaaggaccaaggctttgagatcttggctttcccatgcaatcagtttggtgggcaggagcctggcaccaatgatgagatcgttcagtttgcctgcacccg

SEQ ID NO: 9981 - DNA, 291 bp, Triticum aestivum
  Clone ID: uC-tsrow189085c10b1
cggacgcgtgggcgaggccatggcgcggctgaccacggaccagctcagcgagcccgggtcgccggagaacatgctgtactaccacatgatcccggagtaccagacggaggagagcatgtacaacgccgtccgccggttcggcaaggtgcggtacgacacgctgcggctgccgcacaaggtggtggcgcgggaggcggacggctccgtcaagttcgggcagggcgagggctccgactacctcttggacccggacatctacacggacggcaggatctcggtgcagggcatcga

SEQ ID NO: 9982 - DNA, 373 bp, Triticum aestivum
  unsure (1)..(373): unsure at all n locations
  Clone ID: uC-tsrow189085c11b1
aaacaagacagcgcgaagtggagagtggagaaccaagccgtagctccggtaaagcttcagctacgatgaggacgccgccggagatgccgctgggtctccccttcaccgtcgacacatggggcccatcccgccgccaccggtgccaccgcttcatcacccacgcgcacacggaccacattgccggtgcctgggccggccccggcgacaccgtctacgccacgcagctcaccatgcgcctcgccctcgaacgctatccccagctggagcgggttaagtttgtggaaatggaggtgggaaagaggtnngttggtgggacgaccctgacggcgccttttccgtcaccgcctacgatgccaatcactgtgctggagcg

SEQ ID NO: 9983 - DNA, 423 bp, Triticum aestivum
  Clone ID: uC-tsrow189085c12b1
gaagaaaactgcggttcataaaacgccaattatggatatggatccatcttgctgcgctggatgaagggctggatatggatccatcttgctgatttggaagaaaactgcagttcatacaatgctaattatggatatggatccatctaatacagttcttcacaaagcccaggaatcgcaagggttcaattgctttcggggtcgtacttttcttggtccttattggttggcctgtcttcggcatgatggcggactcgtatggctttgccctgctattctggttatcctctattgtgcattaatatgatcatctgatgtctgtttttcagtgtgcattaagaaatggtagaaacttttgggtattgtatctgactggtactgaatttcctcacaacagcttctagcccgctgctgctgtttacctgc

SEQ ID NO: 9984 - DNA, 313 bp, Triticum aestivum
  Clone ID: uC-tsrow189085d01b1
tccgtgcgtgtggataaataaaacctactagtacctatctatctatgtactatctagatggcacctggaactttagctgttatccagggtgcccgtaagtcggtccgttgtgtcgggtgccgctgggaacgttcccatggatgttaccgtttgtggtgttggcgttgttgaaccaaccaacctgaccctagcttaaccttgcttggattggatgatgtgctagctagctagagctagagctagagttagaccatgcatggctgatggtatgtattgagggatcatatctatctatctccatcctgacttggtg

SEQ ID NO: 9985 - DNA, 407 bp, Triticum aestivum
  Clone ID: uC-tsrow189085d02b1
ttataatggcaggaccaacggcatactttcgaagtgctgaaatgtctccccaagaattcatagagattgtacatgcttactggaacactaagctacatacaacactggttcacgcattggagccatattccaaacaagtaaagagatgcatagaaatagctttaaattgtgtggatgcagatcgacacaaaagaccaagtataggggaaatcattaatgttttgaatgagatggagactgcaatacaagtccctggcgcttcaatgaatcacacagggtcatcgatgaacaagataaatagcgaccaggaaagagagttcctaattagggatgcacaggaaacgctggattatgtacatcgaggacaagggaacacatcattcgaggactgccgacaaactcacata

SEQ ID NO: 9986 - DNA, 259 bp, Triticum aestivum
  Clone ID: uC-tsrow189085d03b1
cttactcggttgtcctatgtccatctggaccagctagtcttgtgcccttatcttggcgtgctatctccggcgactccattcttcatcgcggctgaacaagaagtggttgtcgatttctgtcacgacttaagatcgagccagcttgcgttttgttgcggaaatcttgggtgcgatgttggccgggggatcacgatctttggtgcgccgctctcctgtcccgcagatcgaccgagccaactacagttcttatttatctcgc

SEQ ID NO: 9987 - DNA, 283 bp, Triticum aestivum
  Clone ID: uC-tsrow189085d04b1
ttcatgttcaagagtgagggcaggatcttgcctgatggagtcaacgcgaagctgctcggatgccatggccgcctggcgaaccgtgcccctggacaagctttcctgtctgccgcataatctagcagaagtctatccgttctatcgcaacttattttaccgtgtggaacttagattccaagtgcctgtggtgctatgttattttgtctgaatgttgtgtcgaaccttgttatggaagatattatctattttgtgatgatggtactaatatgaatggcctgttgaa

SEQ ID NO: 9988 - DNA, 322 bp, Triticum aestivum
  Clone ID: uC-tsrow189085d05b1
ttgttctacagagggaaacacgactaccaaggagatgctgttctatgaatcgattgtgccggcatcaggtgatctatacaatgtggttcatgataagagagaataaggctatgtttctgtagagaattcaagccaaccaccatttcaatcaaaaattttgaatgaaaaataagaggatgacaaaagtacagaggaaaacaagtctaccaaggagacgcattcgcgaggttcctattataccgaatcgagtgtgccaccctcaggtgatgaagacaaaaaggtagaagatcaattctatccacacaatttaggccaacattca

SEQ ID NO: 9989 - DNA, 361 bp, Triticum aestivum
  Clone ID: uC-tsrow189085d06b1
gcgtccacgcgtgcgcccacgcgtccgcccacgcgtgcgggttgcactaggatccccgttcacctttgctaccactctagaacaggagtacaagagtgatatctttggggagcgaggaattttgctgggtgctgttcatggcatcgtggaggctctgtttaggagatacacagagcaaggaatggacgaggagctggcatacaaaagcactgtggagggcatcactggaattatctccaagaccatctcaaagaaggggatgcttgaagtatacaactccttgagcgaggaaggcaaaaaggagttcaacaaggcatacagtgcatcattttacccttgcatggacatactctacgaatgc

SEQ ID NO: 9990 - DNA, 372 bp, Triticum aestivum
  Clone ID: uC-tsrow189085d07b1
tcttcgccaaggacgtcaccgaggagaaggccgtcatccccgcgcccgcgccggccgccgaggaggagaagccgcccgccgatgactccaaggccctcgtcgtcgtcgagaaggttgcagatgaacctgttgctgagaaacccacagatgagaaggctgcacacggcggctcaaatgacagagacctcgctcttgcaagggtggaaagtgagaagaggaactctttaattaaagcatgggaggagaatgagaagacgaaggctgagaacaaggctactaaaaaggtgtccgctattctctcatgggagaacaccaagaaagcaaacatagaagctcaactgaagaagattgaggagcaattggaaaagaaga

SEQ ID NO: 9991 - DNA, 392 bp, Triticum aestivum
  Clone ID: uC-tsrow189085d08b1
taacaagactagccatctcacaattatgcttcaaatttttgaagttgccccatcaatctttatggtggaactagagagatctgctggagaaacttcagagtataataagttcgtaaacaactactgctccaaattagatgatatcatctggaaagtttctgctgagaagggaaaatctaggacatcccggctatcgaagcgctaacttatgcacctattacaatttaactgtaaccatgtgggtttgctgcaggtattgcgtatagctgtttcgcttgggttacgtacatcacgggcttggctaatgagtgtactagtgcagtttatcataattgatctatgatctttgagttatatactaccctgacctaagacgtcttatatttgtttac

SEQ ID NO: 9992 - DNA, 427 bp, Triticum aestivum
  Clone ID: uC-tsrow189085d09b1
gccgcacacctcatctcatctcatctcatcatcgtcttccccccattgccattccctccttgcgagtagtagcagcagcaatggccagcctcgccgacctcgtcaacctcgacctcagcgactgcaccgacaagatcatcgtcgagtacctctgggttggaggatccggtatcgacatcaggagcaaagcaaggacggtgaacggccccatcaccgacgcgagccagctgcccaagtggaactacgacggctccagcaccggccaggctcccggagaggacagcgaagtcatcctctacccccaggccattttcaaggacccgttcagaggggtgacaacctccttgttatgtgcgactgctacacacccaaggtgttgcaatccccactaacaagaggcacaatgctgccaagatcttcaacaccc

SEQ ID NO: 9993 - DNA, 371 bp, Triticum aestivum
  Clone ID: uC-tsrow189085d11b1
tcgtcttcaaggtcaaggggctgtggctcttccgtgggcaggacatccctgagtttgtcatgaacgaggtctacgacatggagctctacgagtggaccaaggttgacctctctgacgaggcccagaagaagcgtgtcgaagccatgatcgaggaccttgagccgtttgaggggcaggccttgctggacgccaagtgcttcaagtaagcggatcagtgctttggatcgtgatggcggtgacaaaagaacctatctaggactcaaattcagtgtcgaaacagttgtcttttttggaagagtttgcttgttacttaatggctatttgacctggtgaacttgttaatttttgtgccatgctaagagtttttgggt

SEQ ID NO: 9994 - DNA, 473 bp, Triticum aestivum
  Clone ID: uC-tsrow189085d12b1
tgcagaaagcactagatcgtcttctgccttaccagaggtccgactttgaaggcattttccgtgccatggatgggctcccggtgactatccggctgttggaccctccacttcatgagttccttccagaagggcatgtggaggatattgtgcgtgagctatgtgctgaaagtggagccgctgaggatgatgtccttgcaagaatggagaaactttcagaagtaaatccaatgcttggtttccgtggttgcaggcttggtatttcgtatcctgaattaacagaaatgcaagcccgggccatctttgaagctgctatatccatgaccaaccagggtattcaagtatttccagagataatggttcctcttgttggaacacctcaggaattgggacatcaggtggctcttatccgccaaattgctaacaatgttttcaccaatatggggaaaaccattgattacaaagctgggactatg

SEQ ID NO: 9995 - DNA, 412 bp, Triticum aestivum
  Clone ID: uC-tsrow189085e01b1
ttcttaaagcctacgcatccagagctccaaaccctaagcgaggcgaggcgaggagggagaggccatggatcccgattcggtctcgaaggcgttcgtgcagcactactaccacacgttcgactccaaccgcgccgagctggtggggctgtaccaggacggttccatgctcaccttcaagggcgagaagttcggcggccccgccgccatcgccggcaagctcggatctctccccttccagcagtgccagcacaagatcgacaccgtcgactgccagccctcggggccccatggcggcgtcctcgtgttcgtctccggcaccatcaccaccggccccggcgagcaccccctcaagttctcacagatgttccatttgctgccagctggagggagcttctacgtgcagaacgacatg

SEQ ID NO: 9996 - DNA, 346 bp, Triticum aestivum
  Clone ID: uC-tsrow189085e02b1
gcgtcctctcgtcctgcaaatctacaatggcaatcggcaagaataagcgtttgacgaagggaaagaaaggtggaaagaagaaggcttctgacccatttttgagaaaggaaatgaccactattagatctccctctatgttttctgttagaaatgctggtaaaactattgtgaccaatactactggaacaaagattgcttctgagtctttgaagggtcgtgtcttcgagcactctttggctgatttgaacggcggagatgagtctcagggttatggcaagatccggttacttagtgaggatgtttagggaactaatttaattaccaacttccatggtatggacattac

SEQ ID NO: 9997 - DNA, 367 bp, Triticum aestivum
  Clone ID: uC-tsrow189085e03b1
tcctcgtccgggaaggaaggcagcgagagcagggcgcgggagactgcgagaggctgtcgccatggagaacgagttccaggatggcaaggatgaggtcatacaagcatggtacatggatgacagtgaagaggatcagaggcttcctcaccaccgtgaccccaaagagttcattcctgttgccaaactttcagaattaggtgttgtaagctggaacctaaatgctgataactgggagaaagactagaatctcaagaaaatccgcgaggccaggggatactcctatgcggacatgtgcgacgtatgtcctgagaaattgccaaactatgaggccaagctgaagaatttctttgaagagcacttgcatact

SEQ ID NO: 9998 - DNA, 370 bp, Triticum aestivum
  Clone ID: uC-tsrow189085e04b1
tccacgcgtccgcgcgctgctcatcgtgcacgggcacttcctctacctcaccaagaagtggcaaaagaagtcgacgtggatgtacctggcggtgccgatggtgatgtacgcgtgcgagcggctgacgcgggcgctgcggtcgagcgtgcggccggtgaagatactcaaggtggcggtgtaccccggcaacgtgctgtcgctgcacttgtccaagccgcaggggttccggtacaagagcgggcagtacatcttcgtcaactgcgccgccgtctggccgttccaatggcacccgttctccatcacgtcggcgccgcaggacgactacgtgagcgtgcacatcaggacgctgggggactggacccgggagctc

SEQ ID NO: 9999 - DNA, 341 bp, Triticum aestivum
  Clone ID: uC-tsrow189085e05b1
tggacgcgtgggctatgatccaaagtaggcgctggaacataggaaactaaaaaagagagggcgccgccaccaccgtcatcaggctggtccacatccacgcgctgctcggcgtcactaggtcaccggcacaactcctcacacctaggtcgttcaacattttcttccgcttttggtgcgtcacatttagagtctttctttctcattttaccgtgtttgcatggtaagatgtttggtcggatttgaaggtttgtaaccttggctccaaagcttcaagctcttatagaaattagaaccgatggccttttaaaatgagtcctgcataatagtgttgttcagtggga

SEQ ID NO: 10000 - DNA, 356 bp, Triticum aestivum
  Clone ID: uC-tsrow189085e06b1
gcgtccacgcgtccgccacgcgtccggagactttcgagaaagacactgtgaagtatacacagtatcaaagagcaattgctaaggctttggttgataaggtctcagaggatgaagtttccacaactaggacggtcttgatggttgttggagcaggccgagggcctctcgtaagagcatcattgcaagctgcagaagaaactggtcggaagctaaaagtatatgcagtggagaaaaatcctaacgcagttattactcttcatagtttgatcaaattggaagggtgggaaagcatggttactattatttctagtgacatgcggtgctgggatgctcctgaaaaagctgatattttggtc

SEQ ID NO: 10001 - DNA, 327 bp, Triticum aestivum
  Clone ID: uC-tsrow189085e07b1
tccacgcgtccgcaagtctcagtttcaatatctaataatctccctgctccttccgtcgcgtcgatcgccatgtcctcctccacggggagcttggaccacgcagggttcacgttcacgccgccgcccttcatcacgtccttcaccgagcttctgtcagggtccggcgccggcgacgcggagcggtcgccaagggggttcaaccgagggggccgggccggggcgcccaagttcaagtccgcgcagccgcccagcctgcccatctcgtcgcccttctcctgcttctccatccctgcgggcctcagccctgctgagctgctcgactccccc

SEQ ID NO: 10002 - DNA, 338 bp, Triticum aestivum
  Clone ID: uC-tsrow189085e08b1
tccacgcgtccgcccacgcgtccgcccacgcgtgcgaagccctccgccatggctcccacggcgccttcgccggcgaagtccgcctgcccgtcccaaccatccggcaagagcgaggtgtcggatctgaagcagcagctgcggcagctggcggggagccgtgcgccagacgctgatgatcagcgccgggatgtcttcaagcgggtgatctcttgcatgaccgcaggtatcgacgtgtcggcggcgttcggggagatggtgctctgctccgccacctccgacgttgtgctcaagaagatgtgctacctctacgtcggtgtccatgcgcgcgcccacccgga

SEQ ID NO: 10003 - DNA, 375 bp, Triticum aestivum
  Clone ID: uC-tsrow189085e10b1
tcgcacgcgtgcgccacgcgtccgcggacgcgtgggctcccccgcccgccgccgccgtcgccgcagagccgcagggagagaaggcaaggaggaaggaaggggaagatgccggcggggcacgggctgcggtcgcggacgcgcgacctgttcgcgcggccgttccgcaagaaggggtacatcccgctcaccacctacctgcgcacctacaaggtcggcgagcacgtcgacgtcaaggtgaacggcgccgtccacaagggcatgccgcacaagttctaccacggccgcaccggccgcgtctgcaacgtcaccaagcgcgccatcggcgtcgagatcaacaagcaggtcggcaacaggatcatcaagaagaggatccat

SEQ ID NO: 10004 - DNA, 258 bp, Triticum aestivum
  Clone ID: uC-tsrow189085e11b1
gtccttgtggacccctgccccgttccccggcgacgaccccgactccgccgtcgtcgccgtgcactccaagcccgcctgggacaagcactgggaggaacaccggagcgcctccaagctgatggtcatagatttctccgtctccaggggcgggccctgccgcttaatcgagcccgacttcaaggagatggcctcccgcttcaccgacacgctcttcgtgaagatcgacgtcgacgagctcgcggaggttgcaaagacatt

SEQ ID NO: 10005 - DNA, 470 bp, Triticum aestivum
  Clone ID: uC-tsrow189085e12b1
tcacgcgtgcgatgcactccactgtgtttagtacatctttgaaacttctttatgctttgtaaagcagtacattgtgtaattgttagttacttttgggtagttcgaaatattgcacatttgaatgaaataagacattgtgcatgcctaataacataaggtacatgagctgtcttaactccagtttatgcaaaaggaaaaataattagtgcattgcagaaatatcacattgccagcgctaaatggctgaatgtcgataagaactgcctagttcgacgtttcaccacatgagagttgcacaaataaattatatattctacctaccccttttgagttcttgaatgtttcaatgttgaaacatcgaagcactacttttttcattccgtagctgcttatattttctctggaagtttgcttcaaatttgatgtcaatttctcgtcgtttttattcataatctgtgcagaaaacggag

SEQ ID NO: 10006 - DNA, 253 bp, Triticum aestivum
  Clone ID: uC-tsrow189085f01b1
gcgttcatttcgtctccacccagataaccacgagagatatgttcgtccgccccgacgaccgacgaacggcagagaaaagtgaggtgatcatgagcaccatggcgatgtcggcgctgaacccggacgcgcccatgttcatcccggcggcgttcaagaaggtggaggactactcgcccgagtggtgggagctggtcaagaccaccgcctggttccgcgaccactggttccgccagcaccagctctacgaggacct

SEQ ID NO: 10007 - DNA, 415 bp, Triticum aestivum
  Clone ID: uC-tsrow189085f03b1
agaatctgttaaaagaactcgttgttcagggcctgcttcggttgaaagagccagctgtactgctccgctgccgcaaagaagatcaccataatgtggaatctgtactgcattcagcaaagaatgagtatgcatcaaaagcagatgtccatgagcccgagatactagttgaccacagtgtctacctgccaccttctccgagccatggcgatgagcacggccagatttgccatggaggtgttgtgctggcttctcgagatggaaagattgtgtttgagaatacagttgatgcaaggcttgaagttgttttccgcaagaaattgccagagatccggaagcttcttgttgcggcataatgcgcacttgtattttggtgatggtacagctgtttctatgtaaaatggctgctggtttgacc

SEQ ID NO: 10008 - DNA, 427 bp, Triticum aestivum
  Clone ID: uC-tsrow189085f05b1
ttacgcgtccgcccacgcgtccgtgccatcttcataccaagcatttgggatgcattccagtttactggtgccacagctgccgttttgattggttttatctttcctgccatggtcatattaagggatccttatggaatcgcaaccaagcgtgacaagatattggctgtaaccatgatcgtgcttgctgttgtctcaaactctgttgccctatacagtgatgcgatgaacatcttccgtaggaaagaggtagcctgaaattcaggcttcaaagttcaaaggaagggtgtcactgatgcaggaagcgcagtttcatattacaaaattcagtggctttgaaggaagatggtttgctgggatgctgtgaagaaagatgatttctttggtcagcaactcagcattgagacctgacacatggaagaattggatg

SEQ ID NO: 10009 - DNA, 421 bp, Triticum aestivum
  Clone ID: uC-tsrow189085f06b1
tccacgcgtccgattgattaccattgttggaagtgtgaaggaatctgctcaaatccctacagaatcaagtcaggagcttgctatgctgcaggttaaaacagtatacctcgaacatgttcctctttcttgggataagggcaaagttaaagaatgttgcaaagcatatggggtgattcaggatgttcacactttaaagaagtcaaaaacgaaaacttcttttgtcgaattctcatccaggaagagtgcattagcttgtgtggaaggaataaacagtgccaattttggtggtgaagttaagctggctgcaagtcttgctcgaccacgtcgggaaatacaactggacaagaagagtgctaaaggtggggtcaaggtcaatagtgacgcaacttctaaagacaccaacaattctattaagaaaaag

SEQ ID NO: 10010 - DNA, 207 bp, Triticum aestivum
  Clone ID: uC-tsrow189085f07b1
ttctcacactccaccgagctctcagtcacaagtcacaatggctactagcactaagcttgtagctcttggctttgttgtcctcgtgagcattgggttcaccaatgcttgaaggatgctggctagctcaagtgctggaggtggaggcgggggaagcgggggtggtggcagctcgtcgggtggggttgggagtggatgggggcatggagc

SEQ ID NO: 10011 - DNA, 295 bp, Triticum aestivum
  Clone ID: uC-tsrow189085f08b1
tcgacttgccagttccgatcgctgaacaccaaccactttcctaagtagaggggcgccgcggaaatgtcggcgacgtgcgcggcggacctggcgccgctgctgggcgcggcggcgatgaacgccacggactacctgtgcaacaggttcgccgacaccacgtcggcggtggactcgacctacctgctcttctcggcctacctcgtcttcgccatgcagctcggcttcgccatgctctgcgccggctccgtccgggccaagaacaccatgaacatcatgctcacaaacgtgctcgacg

SEQ ID NO: 10012 - DNA, 388 bp, Triticum aestivum
  Clone ID: uC-tsrow189085f09b1
tcgagctcctcctactcctctgttttgtctgcgcgcgcgcggggacggaggcatcgcagattcctcggttgccgctgcggtccaagaaccgggattcggcccttggttccactccccaaggtgcatttgtgtggaccaagatgacaatataataattgcctagcagaagccacccaacctgtaaattcagtcttctctgcttccagcaaaatgtcagtccggcgacggtcggagagcatggagggtctgttcttattcgatgagcgaaaagaccggaggtcggacgtggagaactcagaggatgagaggagaaggctgtccattggcgggtcactcaagaagaaagcgctgaatgcatcaagcaagctcacacattcgctcaagaagc

SEQ ID NO: 10013 - DNA, 402 bp, Triticum aestivum
  Clone ID: uC-tsrow189085f10b1
ggaggagagcggcggcgaagatggcgccgcctcctccgtcctcgcagacgggaggaacgccgcgctcgccaccctcgccaacctgggccggaactccaccctgcccgccgcatacgcccaccacaccaacgccgccgcctcctcccacggctacgcatggatcgccgccatccccgccgccgtgtacatgctccaggatcaggaggtgcatgccgccgagatggaacgcaccttcatcgccatcaagcctgacggcgtccagagaggcctcatttctgagatagtgtcccgattcgagagaaaagggtacaagcttgttgccatcaagctggtggttccatccaagcagtttgccgagaagcactaccatgatctcaaggaaagacctttcttcagtggact

SEQ ID NO: 10014 - DNA, 390 bp, Triticum aestivum
  Clone ID: uC-tsrow189085f11b1
ttaatctcctccccccacgtcgctcccgcgaggcgaccggggggcaaccctaaatcccgccggtctccgccccctctcccctccccctccctcgccgccgcccgtgggcgcggctgggcaaagcccagccgtcgccggcggcggcggggcctcatcgtcctcctgctcgggcggtgctggcgcgggccggcgcctcgggtcggagcgtggagctgtgccgggcgacacggcggtgcagcgggcagaggcggagctccggtgcctctgctccccctcgacgggcggccaggtgttggtgcgtgctcggctctccgagatcggcgacggcgcggccagatctgacgggcgcggctggatctggggccgggcgacgcgggccgagggcggcac

SEQ ID NO: 10015 - DNA, 443 bp, Triticum aestivum
  Clone ID: uC-tsrow189085f12b1
tcgtccgcccgccgccgtcgccgcacagccgcaggtagagaaggcaaggaggaagggaagatgccggcggggcacgggctgcggtcgcggacgcgcgacctgttcgcgcggcccttccgcaagaaggggtacatcccgctcaccacctacctgcgcacctacaaggtcggcgagcatgtcgacgtcaaggtgaacggcgccgtccacaagggtatgccgcacaagttctaccacggccgcaccggtcgcgtctggaacgtcaccaagcgcgccatcggcgtcgagatcaacaagcaggttggcaacaggatcatcaagaagaggatccatgtgcgtgtggagcacgtgcagccatccaggtgcaacgaggagttcctccagaggaagctcaacaacgacaagctgaaggcggaggccaaggcgcgtggtgaggtcatcagcac

SEQ ID NO: 10016 - DNA, 296 bp, Triticum aestivum
  Clone ID: uC-tsrow189085g01b1
tcacgcgtccgctactagctagccatggcatcttccaagagtagtcttgcaatgtttgcactggccatagtcatggccgtggtggctgacgtctcggcgcagaacaccccgcaggacttcgtcaacctgcacaaccgcgcccgcgccgtggacggcgtcggccccgtggcatgggacaacaacgtggccaggtttgcgcaggactgggcggcgcagcgcgccggcgattgccggctgcagcactccggcgggccgttcggcgagaacatcttctggggttccgggcagtcgtggac

SEQ ID NO: 10017 - DNA, 71 bp, Triticum aestivum
  Clone ID: uC-tsrow189085g02b1
tccttcgttccctactagctagccatggcatcttgcaagagttgtcttgcaatgtttgcactgcccatagt

SEQ ID NO: 10018 - DNA, 352 bp, Triticum aestivum
  Clone ID: uC-tsrow189085g03b1
tcacgcgtccgggcgcgtggtcctggtacagggtgtccaccgccctggaggccgccggccaccgcgtcaccgcgccggacatggccgggtgcggcgaggaggtggcgtccttcgaggagtacagccggccgctgctggacgcggtggcggcgctgccggagggcgagcaggcggtcctcgtcgcccacagcttcggcgggcagagcctcgcgctggccatggagaggcacccggaaaaggtctccgtggccgtgttcgtcacggccaccatgcccgccgccgggaagcccatgacctacgccttcaaccagctatcgcaagggaaagggccggatttcttatggattgcgcg

SEQ ID NO: 10019 - DNA, 396 bp, Triticum aestivum
  Clone ID: uC-tsrow189085g04b1
cttgccaacccggtgaccaaccatgtccagagtgctgagcagcacaaccaggacgtgaactctctgggccttgtctcggccaggaagaccgccgaggccgtggacatcctcaagctcatgtcctccacatacatggtggcgctgtgccaggccatcgacctgcgccacctggaggagaacatcaagacctccgtgaagaactgcgtgacgcaggtgtcgaagaaggtgctgaccatgaaccccaccggcgacctctccagcgcgcgctgtagcgagaagagcctcatcaccgccatcgaccgcgaggccgtgttcagctacaccgacgacgcctgcagcgccaactacccactgatgcagaagctgcgcgccgtgctggtcgaccacgccctgacc

SEQ ID NO: 10020 - DNA, 298 bp, Triticum aestivum
  Clone ID: uC-tsrow189085g05b1
gggccacggcgccgtcgtggaggagatacacgggctcatccgcgtgtacaaggacgggcacgtggagcgcctcccggcgatccccgacgtgccctgcacgtggggctcgacggccgccgggagcggcgtcctcgcgcgcgacgtggcggtcgaccgcgccacgggggtgtgggcgcgcctgtacgcgccggccgccgcggcggggaaggtccccgtggtggtctacttccacggcggcgggttcagcgtcggctccgcggcgtggagctgctaccacgagttcgtcgcccagctcccc

SEQ ID NO: 10021 - DNA, 386 bp, Triticum aestivum
  Clone ID: uC-tsrow189085g06b1
tcctcctctcgcaaaggcactcacctcgaccccaagcggatcaagccagccgtccccgccggcgatgggcaacaccggaccagcaggactatggccttcctctccctcctcccctctgtttttcctcgtgctccccggctctctctcacgatctccctctctctctgtttttcatcagctgcaggtcgctgtcgccttggtcaaccctcgccggagctccgtcgacgccccgttggccggatccggcccggaaacaagcagatcccttcatcctcggtgagctccacctcccgttcccgtcgctccgccgtgcgccaagttccctatcgtcgtgccctgcttctacatcctcccgcttgtctctgtgcgcgctaaaaatgaatgag

SEQ ID NO: 10022 - DNA, 368 bp, Triticum aestivum
  Clone ID: uC-tsrow189085g07b1
ttcacgcgtccgcccacgcgtccgaacggccttgagacctaccctggtgtcaagcgcatcaccatcaagccccagactgaccgctgggtcttcccccgagaccaagactggcatcattgttcttgctgagggtcgtctgatgaaccttggatgtgccactggccaccccagcttcgtcatgtcctgctcattcaccaaccaggttattgctcagcttgagttgtggaacgagaaggccactggcaagtacgagaagaaggtgtacgttctccccaagcacctcgacgagaaggtcgcggccctccacttgggcaagctcggcgccaggctgaccaagctcaccaagtgccagtctgactacattagca

SEQ ID NO: 10023 - DNA, 375 bp, Triticum aestivum
  Clone ID: uC-tsrow189085g08b1
tcgtcggccggtttgttgttgtatgcggagatggggaatacataatctatactgcactggcttggaggaacagatcatttggatccgcgttagagttcgcttggtcatcagaaggagagtacgcaatcagagaaagtacatccagaataaagattttcaataaatcattccaggagaagaaaactatgcgtcctacattctctgcagagcgtatctttggtggggtacttttggcaatgtgttccggtgactttatttgcttttatgactgggctgattgtagactaattcgcagaattgatgtgactgtcaagaatgtctactgggctgatagtggtgacctagttgcaatcgcaagtgatacatcattctaca

SEQ ID NO: 10024 - DNA, 420 bp, Triticum aestivum
  Clone ID: uC-tsrow189085g10b1
tggacgcgtgggcgcgcacttctagacgtgggtgtcatggcagccatggcgggtccggcggagaggaagatgaaggtgtgggagctggtgctgcggtgcctcgtcggcggcttcggcgcggtggcggcggcgctggtggtcaccgacagccagacccggaccttcttctccctcgagcggagggccaagtacaccgacatgaaggcgctggtgctcctggtggccgccaacggcgctgccgtcgggtacagtctgctgcaggcggcgcgctgcgccgtggcgatggcgaggggaggcggcgcgctggtcatgagcagcagggcgctcgcctggtcggtcttctccggcgaccagctgctggcgtacgcgatgctggccgcgacggcggcggcgctgcagtcgtcgctcctcgggaagctc

SEQ ID NO: 10025 - DNA, 318 bp, Triticum aestivum
  Clone ID: uC-tsrow189085g11b1
tccacgcgtccggccacgcgtgcgcgcagaagaaggccggcggctccgccaagaggggagccaagtccagcgccggtgcctcgtcctcgtcggcgtcttcagcggccgataaggccgccaatggcgtcacggcccttaacttatccgatcggacatgtaccggggtcctggcttcgcatccgctctcccatgatatccacattgagtccctttcattaacatttcatggacatgaccttattgcggattcagaattggagcttaactacgggaggcggtctggattgctcaggcttaaatggttgtgggaaatctacc

SEQ ID NO: 10026 - DNA, 384 bp, Triticum aestivum
  Clone ID: uC-tsrow189085g12b1
tcggttgatcgggtcttgagagtccaagagaacggtgctgctacccccaaagaacaagtggtagatgccagcgtcgaagaggccaaggctccacaagtgccttcacaagatgcaggcgttgtggcggcgaacgttgtcgggccttcgacggtaaagccggaggacaaaatggaaatcgatggttgatgtttagggataagaactgtatcggaccccctcttcagtttagttgctaaactggttctagtctaccagtagtcagtactaatgattacctataccaaattttcctgtcccgtatgcttgcgttgttttattgagactttgagaggctaccgttgtttatggtgtaaaaaaaaaaaaaaaaaaaaaaaaagttctaga

SEQ ID NO: 10027 - DNA, 330 bp, Triticum aestivum
  Clone ID: uC-tsrow189085h02b1
cccagacatgttcaagggcacatatgaggcaatcaccaaaggaaatcctatgtggaatgagctgccagtatcagcaagcactctctacccatgggatccaaaatcaacatacatgcacgagcctccttatttcaaggatatgacaatgacccctcctggcgcacggcctgtgaaggatgcgtattgtcttcttaacttcggtgacagtatcacaactgatcacatatccccagctggaagcatgcacccagacagcccagctgccaaatatctaaaggagcgcaatgttgaaaggaaggacttcaactcatatggcagtcgacgagggaa

SEQ ID NO: 10028 - DNA, 286 bp, Triticum aestivum
  Clone ID: uC-tsrow189085h03b1
gcgccctcgcgtccgaaatctcaccgtctccgccccctgccccctcccctgacccccagatcgcaccaaccgccgccgatggccgccgccgccccgccgctcgccgaggcgctcctggccgtcctgctggcgctcgcggccccggcggcggccgagatccgctccacggcgatccgggccgacccgcgcaccatcatcccgctcgacgagttcggcttctccaaccagggcgtgctggagctcaacgtcaccggcatcgccttcgacccgccggcctccccggacc

SEQ ID NO: 10029 - DNA, 345 bp, Triticum aestivum
  Clone ID: uC-tsrow189085h05b1
taccgcgccattctcgaaccttccaagctcctgccggcctcccctcgcttccaccgagtccctccgatggcccgcaccaagcagacggcgcgcaagtccaccggcgggaaggcgccgcggaagcagctggcgacgaaggcagcgcgcaagtcggcgccggccaccggcggcgtgaagaagccgcacaggttccgcccgggaaccgtcgccctgcgcgagatccgcaagtaccagaagagcacggagctgctgatcaggaagctgccgttccagcggctggtgcgggagatcgcgcaggacttcaagacggacctccggttccagtcgtctgctgtgtccgcgctg

SEQ ID NO: 10030 - DNA, 412 bp, Triticum aestivum
  unsure (1)..(412): unsure at all n locations
  Clone ID: uC-tsrow189085h06b1
tcgaagcacaccgcgactgcgccactccctgcgttccgagtgacagaggccatggcgctcgccacctgccaccggcacctggtgcgtcccgccgccgcggcccctcgcgtgccgctgcgtcccctccgcttcgccgccccccgatctctcccgaggatttgttgccaatctatcaactcagctaacgtgttgggagcttcctcaatgacagctgacgacgcagttgcacagccagttgtactgatagaccaagactcagaccgtgatgcaaccattgtgcaactgagttttggagatcgtttgggggcactacttgatacgatgaaggcactcaaggacctgggccttgatgtgacnaaagggaagtgtggcaactgattcatctgtcacacacacaaagttccacatcatg

SEQ ID NO: 10031 - DNA, 193 bp, Triticum aestivum
  Clone ID: uC-tsrow189085h07b1
tctttaaaatcgcgagagatatttcgtcccggacgcgtccgtcccgacgacagacgaacagcagagaaaagtgaggtgatcatgagcaccatggcgatgtcggcgctgaacccggacgcgcccatgttcatcccggcggcgttcaagaaggtggaggactactcgcccgagtggtgggagctggtcaaaacca

SEQ ID NO: 10032 - DNA, 323 bp, Triticum aestivum
  Clone ID: uC-tsrow189085h09b1
ttgaggcctcgccaagaaagacagacagacgcacagagtgactacaacaccaccaccgtgacgaacagacggagaggcaggcagccgtcagagatgaagaagtgcgcgtcggagctggagttcgaggccttcattcggcagcacatcgccgccgccgaggccgaggcccagcggggcaggcccgggcatggaaacgacgacggcgggttcggcggtgatcctggcgccagagcggacgtgttctcccccggcggtggcctgccgggcctctgcttcggcgactcgaacgccctggagctggaagggagcaacgccggccacct

SEQ ID NO: 10033 - DNA, 349 bp, Triticum aestivum
  Clone ID: uC-tsrow189085h11b1
tcggttgatcgggtcttgagagtccaagagaacggtgctgctactcccaaagaacaagtggttgattccagcgtggaataggccagggctccacaagtgccttcacaagatgcaggcgttgtggcggcaaacgtggtctggccttcaacggtaaagtcagaggacaaaacggaaattgatggttgatgttgagggataagaactgcatggacccccctgttaagttcagtagctaaactggctctagattaccagttgtgaggactaatgattacctataccaagttcgcctgtcccgtatgcttgcgtggcatgattgagactttgagaggctacccgggatcatggt

SEQ ID NO: 10034 - DNA, 277 bp, Triticum aestivum
  Clone ID: uC-tsrow189087a01b1
gattttccccacctctgtccggggcggctgtattgtcatctgcgcgctatacctactggatcggcgacattatcgtgacatacactcttcccgtgatgctcaatgccattggtctcgctggagtcttcggcatatatgccatcgtttgtgtactagcctttgtattcgtctacatgaaggtccctgagacaaagggcatgcccctggaggtcatcaccgagttcttctctgtcggggcaaagcagggcaaggtagcctcggactagttgctctgatc

SEQ ID NO: 10035 - DNA, 357 bp, Triticum aestivum
  Clone ID: uC-tsrow189087a02b1
tctttccaatccagcccccctccgatctcggcgagaagtctccgattgaagcgaatcgaatccaaggctctctcctcctcctcctaagatgcagatcttcgtgaagacccttaccggcaagaccatcacccttgaggtcgagtcctctgacaccatcgacaacgtcaaggcaaagatccaggacaaggagggcatccccccggaccagcagcgtctcatctttgctggcaagcagttcgaggatggtcgcacccttgcggactacaacatccagaaggagtccaccctccacctggttctcaggctccgtggtggtatgcagatatttgtcaagacccttactggcaaaaccatcac

SEQ ID NO: 10036 - DNA, 165 bp, Triticum aestivum
  unsure (1)..(165): unsure at all n locations
  Clone ID: uC-tsrow189087a03b1
actgntcaatgttcgcactggccatagtcatgggcgtggttgctgacgtttcggtgcataacaccccgcaggacttcgttaacctgcacaaccgcgcccgcgccgtggacggtgtcggcccggtggcgtgggacaacaacgtggccaggtttgcgcaggactggg

SEQ ID NO: 10037 - DNA, 335 bp, Triticum aestivum
  Clone ID: uC-tsrow189087a04b1
tcttccacgcgtccggaacaagagcaggaatatgtccatccatatacagcagcaagcataccttcctcgcctttctccttgaggttcatcgcagaaacaagaaactcgcagtcatggacagatctgctgtttctcaggcccttccggtgcaccaggaagacgaggacctgttcgagacctcctcctccttcttctgcgactccgacgacgaggcccagttctcagacggcgaggaccagtttgtgccggcttccccgccggtgcggagactcatctctgacagcgtctacgatctgtcgtccatgaaggccgaactctccgccaagaaagggttg

SEQ ID NO: 10038 - DNA, 127 bp, Triticum aestivum
  Clone ID: uC-tsrow189087a05b1
tcctacgcgtccgcaggagcgagtcccttcgagagagctcccttgagagtcgcctgtagcttccccgatcccgcccgatccccaatctccgacgacggcgatgccggccggacgagagatgggagag

SEQ ID NO: 10039 - DNA, 132 bp, Triticum aestivum
  Clone ID: uC-tsrow189087a06b1
tgcatctacttcccatccgccccacgagaggagagactattacgaagcgtgcccaactccatctgcttccttttcctcttccccccgtccccgacgacccccggccgaaaccctagcgaggcgcgatgttcg

SEQ ID NO: 10040 - DNA, 224 bp, Triticum aestivum
  Clone ID: uC-tsrow189087a08b1
tttgtccgcggacgcttgggtcgctcaatgcaggagggccattccttccttagaaatgggaggaaaagtgatcatcatagacatagtgcttggatcttctttagagacaataactgataccgaactgctgatggacatgctgatgttcatatgtaccagaggacggcaacgggatgaaaaggagtggagcacgatctttactaaagcagggtttagcaactata

SEQ ID NO: 10041 - DNA, 193 bp, Triticum aestivum
  Clone ID: uC-tsrow189087a09b1
ttcttcgagcagcttatccaggaaggcagcagcgccttgatccagcaacaaaacccttgtctgcgtaggagaagggaggagaagagagaacctattcttcccccactcccactcctcgcctcacttggagagtcgatcgatcgatccgcgggcacaatgttccaagggtgcggcctgttcgcgtgcgtgagcc

SEQ ID NO: 10042 - DNA, 229 bp, Triticum aestivum
  Clone ID: uC-tsrow189087a10b1
ttcttactccacgcgtccgcccacgcgtccgctgagtctgttgacacaaaatcacatgaaaagcatcaagaaagaggcctgctggactgtttcaaatatcactgctggtaacaaagatcagatacaggctgtgattactgctgggattattggacctctggtgcatctgctgcaaacggctgaattcgatatcaagaaggaggctgcttgggccatcttgaatgctacc

SEQ ID NO: 10043 - DNA, 367 bp, Triticum aestivum
  Clone ID: uC-tsrow189087a11b1
ttcgttcgcccacgcgtccgggaaaacttgccggaagaagatactgcctacagtacatggatggcaaaacgcccttctgctctggctggctccaggcagatcgtagccagagcacaaggcaagaagattgcggccttcttggactacgatggcaccctgtctgctatcgtcgactaccctgaaaaagccggcatgtcccctgtgatgagagctgccgtgagaaacgtcgccaagcacttacctgctgccatcgtaagcggaaggtcctggaagaagggtcttgaattcgcaaaactgaaggaactctgctatgctggcagtcatgggatggacataatgacatcttctttagcacatttatgaacgc

SEQ ID NO: 10044 - DNA, 145 bp, Triticum aestivum
  Clone ID: uC-tsrow189087b02b1
gctcggtcacggcatcctgcagaagctgacgccatgggcggtcgggccgtgcatggtgactcagtgcccgatccagcccaacggctcctacacgtaccggttcaacgtgacggggcacgagggcacactgtggtggcacgcgcac

SEQ ID NO: 10045 - DNA, 306 bp, Triticum aestivum
  Clone ID: uC-tsrow189087b04b1
tcttgacaatgaacttactgacctgagttcggagtattttgtcctgggaaaagactctacaacggcaaggagggagcagaggccgcttacgaagctgtcgtgcaaaagctgagaagatgggttcaacatcctgccctggtactaaatcagatcatagacacaaagctggcaactcgaatgaagccggtatagaagctcctatgcccaacaagttctacatagtgccccaagcaggggcgacgaagctaactgtgcaacaggaggagaaagttaaggagaaggtccgggcgattggatctgaattcc

SEQ ID NO: 10046 - DNA, 356 bp, Triticum aestivum
  Clone ID: uC-tsrow189087b06b1
tctttgacacaaaagtgaactaagaaggccttgagagcttgggcaacgcagacatgtcggccgctgtcactgcaactgtatcggcggtctgtgcgaccgtggcagtagtgataaccatcgtgatgatcagaggatgccgccgttggaggtggaaagtttacaagaagttcatggccaagatctccgacgaggtcaacagaaggaaccgagagctggaagcatgcgctgccgtgaacgatgtggtgatcgagatcggccccgtggagaagttcctccacgagatcctcatcgagaagccgatgaggttcagctcggagcagctggcgtcgtgcaccggggactactccaccgagctc

SEQ ID NO: 10047 - DNA, 52 bp, Triticum aestivum
  Clone ID: uC-tsrow189087b07b1
tgccggaccaccccgaccacgacgacgcgccacagtagttgggagactcttc

SEQ ID NO: 10048 - DNA, 174 bp, Triticum aestivum
  Clone ID: uC-tsrow189087b08b1
ttcttcgacagacctcacgtagagtgacccaacaggtgattcatagactgagcacctagaagacctcgcaacgatgaggtctctcggccgcacttcgttgtgctttcacctggtcctgcttttcctccttgccgtggtcagggcagatgatcctagcctcgccgatggagggag

SEQ ID NO: 10049 - DNA, 392 bp, Triticum aestivum
  Clone ID: uC-tsrow189087b09b1
tcttcgagggaaagggactatctcaagacaatactccatttaatatatggtaaattcatggtgcatcgcccattcatcaggaaagcaatcaacaacatcttctacagatttatatttgaaacggaaaagcataacggtattgcagagctgctggagatcttgggcagtataattaatggttttgccctgccacttaaagaagagcacaaattgttccttctccgtgcactgatcccacttcacaagccaaagtgtgtagcaatgtaccatcagcagctatcgcattgcattacacagtttgttgagaaggactgcaaacttgctgacactgttattaggggcttgctcaagttttggcctataaccaacagttcaaaggaggtgatgttctt

SEQ ID NO: 10050 - DNA, 269 bp, Triticum aestivum
  Clone ID: uC-tsrow189087b10b1
tctgtccgcccacgcgtccgcccgcactcgagcgggcgcccgtactctctgctctcttccccgatcccctcccatgaaccctagcatcctggtgcagccaccccttccttcccccgttcatacccacccctcccccgcgccgtgagcccttccctcctcttcgtcgccactgctgtctctcctcttcctccccgctctagcccctacaggtcgtcgctcgcggtggttccagatcctgcgctggtcgtccccatgggtgaggaggggag

SEQ ID NO: 10051 - DNA, 154 bp, Triticum aestivum
  Clone ID: uC-tsrow189087b11b1
ttcgtccgtgacgctcctggacccggagatggatcagctgatccacgacgccgtcgctgctcacgaccacatggggatcggccccgtgctccggcagtgccgtgagctcttcgaggggcttgagtctctcactgactgcggcggcggtgatggg

SEQ ID NO: 10052 - DNA, 155 bp, Triticum aestivum
  Clone ID: uC-tsrow189087c02b1
cctggtacttggggttgggcttgagtactggcgcgttttctacttcctctcccaccaccccgagagcctccacaccttcttcttcctcttcgacgacgtcggcatccccaccgactaccgacatatggacggcttcggcgtcaacacctacacct

SEQ ID NO: 10053 - DNA, 255 bp, Triticum aestivum
  Clone ID: uC-tsrow189087c04b1
gctgctcacgcgtccgaaagacatgtatgagagggttgactaatactggaaagattgcaaccttgtgttagctgttgctgttgtgatggatccacgttttaagatgaagcttgttgagttcagttactcaaagatttacggcgttgaggctgcaaagtttgttaaggtggtaaatgattcggtgcatgacctttttaaggattatgtggtacagtcgctccccttaacaccggcctatgctgtacaagggaaaac

SEQ ID NO: 10054 - DNA, 205 bp, Triticum aestivum
  Clone ID: uC-tsrow189087c05b1
tcctgccgatatgaatagagcttgatcaagaaggggtcatttgcatcactgaattgatttttccatcttccaacgcgtttgattttgcttgacctcgtcgttgacgaatatttattgatgcaagtcattgctcagctttttatgcgtctcaccaagggttatttcatctacatcttttcatcaatattgttgaaataccgcgtgg

SEQ ID NO: 10055 - DNA, 404 bp, Triticum aestivum
  Clone ID: uC-tsrow189087c06b1
tcttataactacagaggaaaacaagtctaccaaggagatgctgttctatgaatcgtctgtgccggcatcaggtgatgaagacaatgtggttcaggaaaagagagaagaaggtgatgtttctgtagagaattcaggccaaccaccatttcaatcaaaaatttggaatgaaaaagaagaggatgacaaaagtacagaggaaaacaagtctaccaaggagacgcattcgcgaggttcctattttcccgaatcgagtgtgccagcatcaggtgatgaagacaaaaagggagaagatcaattctctgtacacaatttaggccaacattcacttttatcggacatcggagataagaaagagcatggcataacaatggagaaaaagaagtctgccgaggacatgccaccag

SEQ ID NO: 10056 - DNA, 292 bp, Triticum aestivum
  Clone ID: uC-tsrow189087c08b1
tttttccggctatgccaccgatgagacccctgagcgcatgcccctcagccatgtgcttgccaccaagctgggtgcccgcctcactgaagtccgcaagaatggcacttgtgcctggctaaggcctgatggcaaaacccaggtcacggttgaatacctcaacgagggaggtgccatggttcctgtacgtgtgcacactgttctgatctccacccagcatgatgagactgtcaccaatgattgagattgctgcggacctcaaggagcatgtcatcaagccggtgatccctgagaa

SEQ ID NO: 10057 - DNA, 352 bp, Triticum aestivum
  Clone ID: uC-tsrow189087c09b1
tcggctaacgcctcctccccccaaactcccaactacccgcttactcctgagttctgagcccggtcgatccccgccgcagccaccgacgccgcctccgtcaactcgcacggggaacctcgccatggccgccgcgtcgtccgccacctccgtccacgacttcaccgtcaaggatgcaagcggcaaggacgtcgacctcagcgtctacaaggggaaggttcttctcattgttaacgtcgcatcccagtgtggcttgaccaacttcaactacaccgagctgagccagctgtacccgaagtacaaggaccaaggctttgagatcttggctttcccatgcaatcagcttggtgggcag

SEQ ID NO: 10058 - DNA, 292 bp, Triticum aestivum
  Clone ID: uC-tsrow189087c11b1
aaacaagacagcgcgaagtggagaggggagaactcaagccgtagctccggtaaagcttcagctacgatgaggacgccgccggagatgccgttgggtctccccttcaccgtcgacacatggggcccatcccgccgccaccggtgccaccgcttcatcacccacgcgcacacggaccacattgtcggtgcctgggccggtcccggcgacaccgtctacgccacgcagctcaccatgcgcctcgccctcgaacgctatccccagctggagcgggttaagtttgtggaaatggagg

SEQ ID NO: 10059 - DNA, 172 bp, Triticum aestivum
  Clone ID: uC-tsrow189087c12b1
gaagaaaactgcggttcataaaacgccaattatggatatggatccatcttgctgcgctggatgaagggctggatatggatccatcttgctgatttggaagaaaactgcagttcatacaatgctaattatggatatggatccatctaatacagttcttcacaaagcccaggaa

SEQ ID NO: 10060 - DNA, 339 bp, Triticum aestivum
  Clone ID: uC-tsrow189087d02b1
tctttataatggcaggaccaacggcatactttcgaagtgctgaaatgtctccccaagaattcatagagattgtacatgcttactggaacactaagctacaaacaacactggttcacgcattggagccatattccaaacaagtaaagagatgcatagaaatagctttaaattgtgtggatgcagatcgacacaaaagaccaagtataggggaaatcattaatgttttgaatgagatggagactgcaatacaagtccctggcgcttcaatgaatcacacagggtcatcgatgaacaagataaatagcgaccaggaaagagagttcctaattagggatgcac

SEQ ID NO: 10061 - DNA, 243 bp, Triticum aestivum
  Clone ID: uC-tsrow189087d04b1
tgactgctcaagcgcaagagtgagggcaggatctggcctgttggagtcaactcgaagttgctcggatgccatggccgcctggcgaaccgtgcccctggacaagctattctgtttgccgcataatctagcagaagtctatccgttctatcgcaacttattttaccgtgtggaacttagattccaagtgcctgtggtgctatgctattttgtctgaatgttgtgtcgaaccttgctatggaagat

SEQ ID NO: 10062 - DNA, 359 bp, Triticum aestivum
  Clone ID: uC-tsrow189087d06b1
tttcacgcgtccgcccacgcgtccgcccacgcgttcgggttgcactaggatcctcgttcacctttgctaccactctagaacaggagtacaagagtgatatctttggggagcgaggaattttgctgggtgctgttcatggcatcgcggaggctctgtttaggagatacacagagcaaggaatggacgaggagctggcatacaaaagcactgtggagggcatcactggaattatctccaagaccatctcaaagaaggggatgcttgaagtatacaactccttgagcgaggaaggcaaaaaggagttcaacaaggcatacagtgcatcattttacccttgcatggacatactctacgaatgc

SEQ ID NO: 10063 - DNA, 249 bp, Triticum aestivum
  Clone ID: uC-tsrow189087d07b1
tgccgcccgccaaggacgtcaccgaggagaaggccgttttccccgcgcccgcgcttgccgccgaggaggagaagccgtccgccgatgactccaaggccctcgttgtcgctgagaaggttgcagatgaacctgttgctgagaaacccacagatgagaaggctgcacacggcggctcaaatgacagagacctcgttcttgcaagggtggaaagtgagaagaggaactctttaattaaagcatgggaggaga

SEQ ID NO: 10064 - DNA, 361 bp, Triticum aestivum
  Clone ID: uC-tsrow189087d09b1
tctttcggccgcacacctcatctcatctcatctgatcattgtcttccccccattgccattccctccttgcgagtagtagcagcagcaatggccagcctcgccgacctcgtcaacctcgacctcagcgactgcaccgacaagatcatcgtcgagtacctctgggttggaggatccggtatcgacatcaggagcaaagcaaggacggtgaacggccccatcaccgacgcgagccagctgtccaagtggaactacgacggttccagcaccggccaggctcccggagaggacagcgaagtcatcctctacccccaggccattttcaaggacccgttcaggaggggtgacaacctccttgttatgt

SEQ ID NO: 10065 - DNA, 376 bp, Triticum aestivum
  Clone ID: uC-tsrow189087d11b1
ttcttttgccttcaaggtcaaggggctgtggctcttccgtgggcaggacatccctgtgtttgtcatgaacgaggtctacgacatggagctctacgagtggaccaaggttgacctctctgacgaggcccagaagaagcgtgtcgaagccatgatcgaggaccttgagccgtttgaggggcaggccttgctggacgccaagtgcttcaagtaagcggatcagtgctttggatcgtgatggcggtgacaaatgaacctatctaggactcaaattcagtgtcgaaacagttgtcttttttggaagagtttgcttgttacttaatggctatttgacctggtgaacttgttaatttttgtgccatgcttagagttcttgggt

SEQ ID NO: 10066 - DNA, 178 bp, Triticum aestivum
  Clone ID: uC-tsrow189087d12b1
tcccgggcagaaagcactagatcgtcttctggcttacctgaggtccgactttgatggcattttccgtgccatggatgggctcccggtgactatccggctgttggaccctccacttcatgagttccttccagaagggcatgtggaggatattgtgcgtgagctatgtgctgaaagtgga

SEQ ID NO: 10067 - DNA, 249 bp, Triticum aestivum
  Clone ID: uC-tsrow189087e04b1
gctgctcacgcgtccgcgcgctgctcatcgggcgcggttcattacctctacctgaccaatgaagaggcaaaagaagtcgacgtggatgtacctggcggtgccgatggtgatgtacgcgtgcgagcggctgacgcgggcgctgtgggcgagcgtgcggacggtgaagatactcaaggtggcggtgtgccccggcaacatgctgtagctgcacttttacaagccggaagggttccggagcaagagcgggca

SEQ ID NO: 10068 - DNA, 299 bp, Triticum aestivum
  Clone ID: uC-tsrow189087e05b1
tgctgacgcgtgggctatgatccaaagtaggggctggatcataggaaactactaatgagagggcgccgtctccaccggcatcaggctggtgcacatgcacgcgctgctcggagtaactaggtcaccggcgcaactcctcacacctaggtcgttcaacattttcttccgcttttggtgcgtcacatttagagtctttctttctcattgaaccgtgtttgcatggttagatgtttggttggatttgaaggttcgctaccttggctccaaaggcttaagctcttatagaaattagaaccgat

SEQ ID NO: 10069 - DNA, 395 bp, Triticum aestivum
  unsure (1)..(395): unsure at all n locations
  Clone ID: uC-tsrow189087e06b1
tgnctccccacgcgtccgccacgcgtccggagactgtcgtgaaagacactgtgaagtatacacagtatcaaagagcaattgctaaggctttggttgataaggtctcacaggatgaagtttccacaactaggacggtcttgatggttgttggagcaggccgagggcctcttgtaagagcatcattgcaagctgcagaagaaactggtcggaagctaaaagtatatgcagtggagaaaaatcctaacgcagttattactcttcatagtttgatcaaattggaagggtgggaaagcatggttactattatttctagtgacatgcggtgctgggatgctcctgaaaaagctgatattttggtcagcgagttgcttgggtcctttggtgataatgagtta

SEQ ID NO: 10070 - DNA, 315 bp, Triticum aestivum
  Clone ID: uC-tsrow189087e07b1
cccacgcgtccgcaagtctcagtttcaatatctaataatctccctgctccttccgtcgcgtcgatcgccatgtcctccttcacggggagcttggaccacgcagggttcacgttcacgccgccgcccttcatcacgtccttcaccgagcttctgtcagggtccggcgccggcgacgcggagcggtcgccaagggggttcaaccgagggggccgggccggggcgcccaagttcaagttcgcgcagccgcccagcctgcccatctcgtcgcccttctcctgcttctccatccctgcgggccttagccctgctgagctg

SEQ ID NO: 10071 - DNA, 261 bp, Triticum aestivum
  Clone ID: uC-tsrow189087e08b1
cccacgcgtccgcccacgcgttcgcccacgcgttcgaagccctccgccatggctcccacggcgccttcgccggcgaagtccgccttcccgttccaaccatccggcaagagcgaggtgtcggatctgaagcagcagctgcggcagctggcggggagccgtgcgccagacgctgatgatcagcgccgggatgtcttcaagcgggtgatctcttgcatgaccgcaggtatcgacgtgtcggcggcgttcggggagatggtgctc

SEQ ID NO: 10072 - DNA, 121 bp, Triticum aestivum
  Clone ID: uC-tsrow189087e10b1
ccacgcgtccgccacgcgtccgcggacgcgtggtctcccccgcccgccgtcgccgccgccgcagagccgcagggagagaaggcaaggaggaaggaaggggaagacgccggcggggcacggg

SEQ ID NO: 10073 - DNA, 380 bp, Triticum aestivum
  Clone ID: uC-tsrow189087e12b1
ccacgcgttcgatgcactccactggggggagttctatctttgaaacttctttatgctttgtaaagcagtacattgtgttattgttagttacttttgggtagttcgaaatattgcacatttgaatgaaataagacattgtgcatgcctaataacataaggtacatgagctgtcttaactccagtttatgcaaaaggaaaaataattagtgcattgcagaaatatcacattgccagcgctaaatggctgaatgtcgataagaactgcctagttcgacgtttcaccacatgagagttgcacaaataaattatattattctacctaccccttttgagttcttgaatgtttcaatgttgaaacatctgagcactactttttttat

SEQ ID NO: 10074 - DNA, 207 bp, Triticum aestivum
  Clone ID: uC-tsrow189087f05b1
agcatttgggatgcttttcagtttactggtgcctcagttgccgttttgattggttttatctttcctgccatggtcatattaagggatccttatggtatcgcatccaagcgtgacaagatattggctgtatccatgatcgtgcttgctgttgtctcaaactttgttgccctatacagtgatgcgatgaacatcttccgtaggaaagag

SEQ ID NO: 10075 - DNA, 176 bp, Triticum aestivum
  Clone ID: uC-tsrow189087f06b1
cctgcccacgcgtccgattgattaccattgtgggaagtgttaaggaatctgctcaaatccctacagaatcaagtcaggagcttgctatgctgcaggttaaaacagtatacctcgaacatgttcctctttcttgggataagggcaaagttaaagaatgttgcaaagcatatggggtg

SEQ ID NO: 10076 - DNA, 144 bp, Triticum aestivum
  Clone ID: uC-tsrow189087f07b1
atctcacactccaccgagctctcagtcacaagttacaatggctactagcactaagcttgtagctcttggctttgttagcctcgtgagcattgggttcaccaatgctttaaggatgctggctagctcaagtgctggaggtggagg

SEQ ID NO: 10077 - DNA, 321 bp, Triticum aestivum
  Clone ID: uC-tsrow189087f08b1
ccgacttgccagttccgatcgctgaacaccaaccactttcctaagtagaggggcgccgcggaaatgtcggcgacgtgcgcggcggacctggcgccgctgctgggcgcggcggcgatgaacgccacggactacctgtgcaacaggttcgccgacaccacgtcggcggtggactcgacctacctgctcttctcggcctacctcgtcttcgccatgcagctcggcttcgccatgctctgcgccggctccgtccgggccaagaacaccatgaacatcatgctcacaaacgtgctcgacgccgccgccggcgcgctcttctactac

SEQ ID NO: 10078 - DNA, 343 bp, Triticum aestivum
  Clone ID: uC-tsrow189087f09b1
tcgagctcctcctactcctctgttttggctgctcgcgcgcggggacggaggcatcgcagattcctcggttgccgctgcggtccaagaaccgggattcggcccttggttccactccccaaggtgcatttgtgtggaccaagatgacaatataataattgcctagcagaagccacccaacctgtaaattcagtcttctctgcttccagcaaaatgtcagtccggcgacggtcggagagcatggagggtctgttcttattcgatgagcgaaatgaccggaggtcggacgtggagaactcataggatgagaggagaaggctgtccattggcgggtcactcaagaaga

SEQ ID NO: 10079 - DNA, 85 bp, Triticum aestivum
  Clone ID: uC-tsrow189087f11b1
tcgctgacgataatctcctccccccacgttgctcccgcgaggttaccggggggcaaccctaaatcccgccggtctccgtcccctc

SEQ ID NO: 10080 - DNA, 213 bp, Triticum aestivum
  Clone ID: uC-tsrow189087g01b1
tcttcacgcgtccgctactagctagccatggcggggttttatgagtagtcttgcaatgtttgcactggccatagtcatggccgcggtggctgacgtctcgtcgcagaacaccccgcaggatcttgtcaacctgcacaaccgcgcccgcgccgtggacggagtctgccccgtggcatgggacaacatcgtggccaggtttgcgcaggactgggc

SEQ ID NO: 10081 - DNA, 107 bp, Triticum aestivum
  Clone ID: uC-tsrow189087g03b1
ttcttacgcgtccgggcgcgtggtcctggtacagggtgttcaccgccctggaggccgtctgccaccgtgtaaccgcgccggacatggacgggtgcggcgaggaggtg

SEQ ID NO: 10082 - DNA, 287 bp, Triticum aestivum
  Clone ID: uC-tsrow189087g04b1
cttgccaacccgtttgttcaaccatgtccagagtgctgagcagcacaacctgtacgtgaactctctgggccttgtctcggccaggaagaccgccgaggccgtggacatcctcaagctcatgtcctccacatacatggtggcgctgtgccaggccatcgaccttcgccacctggaggagaacatcaagacctccgtgaagaactgcgtgacgcaggtgtcgaagaaggtgctgaccatgaaccccaccggcgaccttttcagcgcgcgctttagcgagaagagcctca

SEQ ID NO: 10083 - DNA, 133 bp, Triticum aestivum
  Clone ID: uC-tsrow189087g05b1
tggtgccacggcgccgtcgtggaggagatacacggtcttatccgcgtgtacaaggacgggcacgtggagcgcctcccggcgatccccgacgtgccctgcacgtggggctcgacggccgacgggagcggcgttc

SEQ ID NO: 10084 - DNA, 415 bp, Triticum aestivum
  Clone ID: uC-tsrow189087g06b1
ttctgtctcctctcgcaaaggcactcacctcgaccccaagcggatcaagccagccgtccccgccggcgatgggcaacaccggaccagcaggactatggccttcctctccctcctcccctctgtttttcctcgtgctccccggctctctctcacgatctccctctctctctgtttttcatcagctgcaggtcgctgtcgccttggtcaaccctcgccggagctccgtcgacgccccgttggccggatccggcccggaaacaagcagatcccttcatcctcggtgagctccacctcccgttcccgtcgctccgccgtgcgccaagttccctatcgtcgtgccctgcttctacatcctcccgcttgtctctgtgcgcgctaaaaatgaatgagccgccgcctgcgttgacccgctgct

SEQ ID NO: 10085 - DNA, 330 bp, Triticum aestivum
  Clone ID: uC-tsrow189087g07b1
cccacgcgtccgcccacgcgtccgaacggtcttgtgacctaccctggtgtcaagcgcatcaccatcaagccccagactgaccgttgggtcttccccgagaccaagactggcatcattgttcttgctgagggtcgtctgatgaaccttggatgtgccactggccaccccagcttcgtcatgtcctgctcattcaccaaccaggttattgctcagcttgagttgtggaacgagaaggccactggccagtacgagaagaaggtgtacgttttccccaagcacctcgacgagaaggtcgcggccctccacttgggcaagctcggcgccaggctg

SEQ ID NO: 10086 - DNA, 304 bp, Triticum aestivum
  Clone ID: uC-tsrow189087g08b1
acggccggtttgttgttgtatgcggagatggttaatacataatctatactgcactggcttggaggaacagatcatttggatccgtgttagagttcgcttggtcatcagaaggagagtacgcaatcagagaaagtacatccagaataaagattttcaataaatcatcccaggagaagaaaactatccgtcctacattctctgcagagcgtatctttggtggggtacttttggcaatgtgttccggtgactttatttgcttttatgactgggctgattgtagactacatcgcagaattgatgtgac

SEQ ID NO: 10087 - DNA, 103 bp, Triticum aestivum
  Clone ID: uC-tsrow189087g10b1
ttttcgcggacgcgtgggcgcgcacttctagacgtgggtgtcatggctgccatggcggttccggcggagaggaagatgaaggtgtgggagctggtgctgcggt

SEQ ID NO: 10088 - DNA, 321 bp, Triticum aestivum
  Clone ID: uC-tsrow189087h02b1
tcctagacacgctcaatggcacatatgaggcaatcaccaaaggaaaggctatgtttaatgagctgccagtatcatcaagcactctctacccatgggatccagaatcaacatacatgcacgagcctccttatttcaaggatatgacaatgacccctcctggcgcacggcctgtgaaggatgcgtattgtcttcttaacttcggtgacagtatcacaactgatcacatatccccagctggaagcatccacccagacagcccagctgccaaatatctaaaggagcgcaatgttgaaaggaaggacttcaactcatatggcagtc

SEQ ID NO: 10089 - DNA, 340 bp, Triticum aestivum
  Clone ID: uC-tsrow189087h03b1
gcctcctcacgcgtccgaaatctcaccgtctgcggggcctcctccctcccctcacccccagatcgcaccaaccgccgtcgatggccgccgccgccccgccgctcgccgcggcgctcctggccgtcctgctggcgctcgcggccccggcggcggccgagatccgctccacggcgatccgggccgacccgcgcaccatcatcccgctcgacgagttcggcttctccaaccagggcgtgctggagctcaacgtcaccggcatcgccttcgacccgccggcctccccggacctcgacctctcccagttcggcttcttcctttccacgctcgacgcctgggtgca

SEQ ID NO: 10090 - DNA, 258 bp, Triticum aestivum
  Clone ID: uC-tsrow189087h05b1
tgcaccgcgccattctcgaaccttccaaggggcgttcggtctcccctcgcttccaccgagtccctccgatggcccgcaccaagcagacggcgcgcaagtccaccggcgggaaggcgccgcggaagcagctggcgacgaaggcagcgcgcaagtcggcgccggccaccggcggcgtgaagaagccgcacaggttccgtccgggaaccgtcgccctgcgcgagatccgcatgttccagaagagcacggagctgctgatca

SEQ ID NO: 10091 - DNA, 294 bp, Triticum aestivum
  Clone ID: uC-tsrow189087h06b1
tgccgaagcacaccgcgactgcgccactgggggcgtttttagtgactgaggccatggcgctcgccacctcccaccgccaccttgtccgccccgccgccgcggcccctcgcgtgccgctgcgtcctctccgcttcgccgccccccgatctcttccgaggatttgttgccaatctatcaactcagctaacgtgctgggagcttcctcaatgacagctgacgacgcatttccacagccagttgtactgattgaccaagactcagaccgtgatgcatccattgtgctactgagttttg

SEQ ID NO: 10092 - DNA, 248 bp, Triticum aestivum
  Clone ID: uC-tsrow189087h07b1
tttgttctggaaaatcgcgagagatatttcgggggggactctttcgtcctgtcgacttataacagcagagaaaagtgaggtgatcatgagcaccatggcgatgtcggcgctgaacccggacgcgcccatgttcatcccggcggcgttcaagaaggtggaggactactcgcccgagtggtgggagctggtcaaaaccaccgcctggttccgcgaccactggttccgccagcaccagctctacgaggacc

SEQ ID NO: 10093 - DNA, 331 bp, Triticum aestivum
  Clone ID: uC-tsrow189087h09b1
ggaggcctcgccaagaaagacagacggactcattgagtgacgacaacactcaccaccgtgacgaacagacggagaggcaggcagccgtcagagatgaagaagtgcgcgtcggagctggagttcgaggccttcattcggcagcacatcgtcgtcgccgaggccgtggcccagcggggcaggcccgggcatggaaacgacgacggcgggttcggcggtgatcctggcgccagagcggacgtgttctcccccggcggtggcctgccgggcctttgcttcggcgactcgaacgccctggagctggaagggagcaacgccggccacctgtggtggt

SEQ ID NO: 10094 - DNA, 208 bp, Triticum aestivum
  Clone ID: uC-tsrow189087h12b1
gttcctccaccgaccggggggggctctttcctgcacttccctcgtccaaggccgcaccagagaaggcggaaaacatcacagtttgcgaaatcgtggagcggtagagagagacggccgagacggtgttcgctccgtgcttggaagggatgaagcatgtcaggtcggacagcggggtcatgctcgccaagcccttccttgatgtctgcaa

SEQ ID NO: 10095 - DNA, 259 bp, Triticum aestivum
  Clone ID: uC-tsrow189089a02b1
actgatataattcaacactagctagctgcacaggacactagccgatccatccatccagaaaaaaaagagtgcccgtcgaaaatgccggtgagcaggatcgccatcggcgccccgggggagctgtcccacccggacaccttccgcgccggcgtcgccgagttcatctccatgctcatcttcgtcttcgccggctcaggctccggcatggccttcggcaagctgactgacggcggcgcgacgactccggcggggctgatcg

SEQ ID NO: 10096 - DNA, 297 bp, Triticum aestivum
  Clone ID: uC-tsrow189089a03b1
tcgtagcgagccgcaccagacgccgcaagaaccaccaccacaagagagcgcaccccggaacaaggaaaggcagggagagaaggcaaagaggccgcacggcgaccaggcacaggccgcggcgcaggccggggaggcgccgcgagggggcgccgcggagggggccggcgagagcgggaggaccgcccccgaccggagggcccggcgcaaggccccgggcagcgcggcggcggacgagccggactcggcgcccaccagcagcagcagcacggcggagcacacccgagggaagagccccag

SEQ ID NO: 10097 - DNA, 314 bp, Triticum aestivum
  Clone ID: uC-tsrow189089a11b1
gcttcctcgctgccgggaggttggttgccaaagatggctttcttaaggcaatatggccttacagcggccactacctcccaacagaggagaacttcagggagttcatcagtttcttggaggagaacaatgtggatctagctaacgtcaagaggtgttccgtggacgacgacgagtacccatcgttcaagaagacctcagacgagcctactgaaatggaagaacatgacgagaagcccaccgaggcgcaacatgatgggaccctcaacagctcgcaaattgaactgcctgagatggacatcatcaaggaaatggtt

SEQ ID NO: 10098 - DNA, 425 bp, Triticum aestivum
  Clone ID: uC-tsrow189089b01b1
acctcccacgcgggcgcccacgcgtccgcgcggcaccagccactgaagccggggcgtctcatccggctccaggcgaggacttggaagccgctctgccaggcccgccgccaggaactccacctgcgtctgcgatcacccagcaggagactccagcttctccggctgcggatccagaagatgatctgcctctgcctcctccccctgcactgacccagcatgaggaggatggaacgccagacgatgatctgcctgtgcctcctcctgctgcactgccccagcaggaggctggagcgccaggttcagcgccagaggcaggagccgtcgatgacaagtgggcaggaggtggcgatgacaagtgggcgggaggccccgatgacaagtgggtctagtggttgcttaaggcgtggaactgaactgaactgaac

SEQ ID NO: 10099 - DNA, 223 bp, Triticum aestivum
  Clone ID: uC-tsrow189089b02b1
cctcgccacgcgtacgccgacgcgtccgcgcgggacctgttacggaagaccgggcgtgtcagccgggtccaggcgaggactaggaagccgcgctggcaggccagccgccaggaactgcagctgcgtctgcgatcacccaacaggagactccagcatgtccggatggggctccagaagatgatctgcctctgcccactccacctccactgacccagcatgagga

SEQ ID NO: 10100 - DNA, 450 bp, Triticum aestivum
  Clone ID: uC-tsrow189089b05b1
cctgcctctagccatgggccaacagacctgagatctcgctctcgcctccttgcgcagtccccaccgagagcagcacgaaaatggcggcgagcaacctcgagggtgtgctcctggggatgggcaaccccctgctcgacatctacgcctgcggcgacgaggccttgctcgctcagtatgatgtgaagcccaacaatgccattcttgccgaggacaagcacttgcccatgtacgatgagttgtccagcaaggacaatgctgaatatatcgctggaggagccacgcagaactctatcagggatgcccaatggatgctgcaaactgctggtgcaacaagttacatgggctgcattggaaaggacaagtatgtcgaggagacgaagagcgccgctaaagctgcaggagttactgctcattactatgaggatgaggctgctcctacaggcacatgtg

SEQ ID NO: 10101 - DNA, 224 bp, Triticum aestivum
  Clone ID: uC-tsrow189089b07b1
acgcccacgcgaccgaccacgcgagcgacacgcgacaacccacgcgaccgggacgccagcagagaggggcccagacggcaaaaccaacgaagccgaagcggcccagggcacagaaacccgccacgaccgggaacaccagaaaggaggcgaaaccagcacaaacagcaggagccacaagacggggagaggacaagaggacgcgcacacagggcaaagcgagacga

SEQ ID NO: 10102 - DNA, 374 bp, Triticum aestivum
  Clone ID: uC-tsrow189089c01b1
tgttcgtgcctccccggagatcacgagaggcggcgcccccatcctcgcgatggacgcctactaccgccgctcaggtgcgggcggtggcggcggctcagccccccgcaccgacgaggacatctgcaaggactaccgcgcccgccgcaacgccatccaccgcgccctcacccacgacgtcgaggagtgctacgcgcagtgcgatccagagaaggagaacctgtgcctgtacgggtacgctaacgaggcgtgggaggtggcgctgcccgcggaggaggtgcccaccgagctgccggagccagcgctcgggatcaactatgcgcgcgacgggatgaagcgcagcgactggctcgcgctcgtcgacgtgcactccgatt

SEQ ID NO: 10103 - DNA, 450 bp, Triticum aestivum
  unsure (1)..(450): unsure at all n locations
  Clone ID: uC-tsrow189089c02b1
cctcagtccgtcctcgcaagagggcctcctcttctcggactgcctcaaggacttgaggaatctgcggtcgcagctatactcagcggcagaatattttgaagtattctacacaaacaactcgcacagatctacggtggtaacgagtttaaaagactacgcagttgaggcactcgttagtactgttgaccatctgggttttgtgtcgtacaaggtggataatctcgtcaatgaaaaggctgacgaggttaatgaaacagaatttcgagtatcgtcggttgaacagagggtaaagatttgccagcaggcaattgaccaggagggaagatctcaacagtctcttcttatcagggcgccgcagtaccacaggcgttacatattaccaggcgcagatatagtggaatctgctatccatccngtttcagagcccacacggtacagcaggcaacatac

SEQ ID NO: 10104 - DNA, 483 bp, Triticum aestivum
  Clone ID: uC-tsrow189089c04b1
actgaccacgcggacgcccacgcgtccgcccacgcgttttgtcatatgccagtgcggtaaagcagattgatgagctttgctcattttatgcttggtgtaaggacaccggggtagcgagatcatcggagtacccagaggtgcagcgggtcactgataagttactggagacattggaggagtttatgagggaccgggcaaagcgccccaagagtccaccacgggagcctgagcctgagccggtcaaggaggaagagccagagccggacatgaacagcatcaaggcacttactgcaccagaggactacaaggagcctgaacctgagaaggtggaggaagaggtgaagccagagcccccgccgcagccccagggtgatctggtggatcttagagaagacactgtgagtgcagatgagcaaggcaataggcttgctctggccctgttccaagggccacctgctgctggtggtagcaatgggtcatggg

SEQ ID NO: 10105 - DNA, 397 bp, Triticum aestivum
  Clone ID: uC-tsrow189089c05b1
ccctcggcttccagatgcctagccacatgaccctgcgttcttgcaccgacgaaacaccagagacggagacatggggctgaaggggttcgtcgagggcggcgccgcctccgtcgtcgccggctgctcgacgcacccgctcgacctcatcaaggtccgcatgcagctacagggcgaggcggcccgggcccctgccccagccatgcgcttcgcgctcgtgttcccccccggcgtgcagcatcaccaccacaacgaccacctgctgcagccgccgcgcaggcccgggcccatcgccatcggcgcgcagatcttgcgggcggagggccccgcagggctgctctccggggtgtcggccaccgtgctgcggcaggcggtctactcctcgacgtccatggggctc

SEQ ID NO: 10106 - DNA, 135 bp, Triticum aestivum
  unsure (1)..(135): unsure at all n locations
  Clone ID: uC-tsrow189089c07b1
cagaagccacacaagggagcgcaacggacaacaagcaaggagaaggcggcaacgggccagacaacaagggaaagcaagaggaaggacaggaaanagccngaaagacacaaacgcaggcagcgacacagggacccg

SEQ ID NO: 10107 - DNA, 396 bp, Triticum aestivum
  Clone ID: uC-tsrow189089c08b1
tgcagaaaccacacaaggggacgcaacggacttcaagcggggagaaggcggctactggccagactacaagggtaagcttgaggatggacaggaaatagccgttaagacactttcgcaggcatcgacacagggtcccgatgagttcaagaatgaggttatgctgatagcgaaactccagcatcggaatcttgttcgactgatcggctgctgcatctgtggacaagaaaaaatactcatatatgaatacatggcaaacaagagcctggacttcttcctgttcgacaaatccaagattatgcttctggactggcaaacccggtaccgcataatcgaggggatcgcccgaggattactgtatcttcaccaggactcgagatacagaatcgttcacagaga

SEQ ID NO: 10108 - DNA, 476 bp, Triticum aestivum
  Clone ID: uC-tsrow189089c09b1
taccgcggaaggcgacgagacccatgtctcgacacttgtcatgggcacccatggctacgccgcaccagagtacatgctaactggtcacctcacagcgaaaagcgatgtttacagctttggtgtcgttcttctggagatcctcactggaagacgagccgtggacaagacccggcctagtagggagcaccatctagtccagcacatgcggtcgtggctcaaagaccctgaaaagctaggaaaaatcatggaccctgcgttggagggtaagtatgccaccacggcagctcataaggcagccctagtggcataccagtgcctgagtggcagcccaaagagcaggccggacatgtcgaaggtcgtggaagacctagaactgctactcaacctcgtggatgatgttcccggtgagccggtgatgcatgtagcttcacaagatgacactaggaaggaaagaacaagaagaagaaatggagaga

SEQ ID NO: 10109 - DNA, 358 bp, Triticum aestivum
  Clone ID: uC-tsrow189089c12b1
cacgcggccgccacaagagagggaacgtttgttcaaggaaaggcccggagagacggcaatgaggccgctcgacgtcctggctctggccgaggcgctggccggggtggcgctgcgagggggcgccgcggagggggccggcgagtgcgggaggacctcccccgaccggatggccctgcgcatggccccgtgcatctcggcggcggacgagccggactcggcgccctccagcagctgctgctcggcggtgcacaccctagggaagagccccagctgcctgtgcgccgacatgctgtccggcaccgccaagatggccgggatcaagcccgaggtggccatcaccatccccaagcgctgcaac

SEQ ID NO: 10110 - DNA, 82 bp, Triticum aestivum
  Clone ID: uC-tsrow189089d02b1
tcttgacgcctggggagggctccagggagtgcccattgttggggagccctccggtattgctggatgaacggccaaaccagtg

SEQ ID NO: 10111 - DNA, 286 bp, Triticum aestivum
  Clone ID: uC-tsrow189089d03b1
cctgaacacaacgacccaaccgcaaccgggccagagcgtttacacacaacagagcggcagcagagcccgggccgaacccgccccggccggcgccatggactgcgactgcggggagaagctcctcgtgggcctcctcgcggccgtggtgggcgccatcgtcgtgtccaagatccggggccgcaagctgcggctgccgccgggccccttcccggtgcccatcttcggcaactggctgcaggtcggcgacgacctgaaccaccgcaacctggcggcgatggcgcgcaag

SEQ ID NO: 10112 - DNA, 266 bp, Triticum aestivum
  Clone ID: uC-tsrow189089d04b1
ctcgtttacaacaacccaaccgcaaccgggccagagctccaacacacaacacagcggtagcagttcccgggccgctcccgccccggccggcgccatggactgcgacttcgtggagaagctcctcgtgggcctcctcgcggccgtggtgggcgccatcgtcgtgtccaagatccggggccgcaagctgcggctgccgccgggccccttaccggtgcccatcttcggcaactggctgcaggtcggcgacgacctgaaccaccgcaacc

SEQ ID NO: 10113 - DNA, 452 bp, Triticum aestivum
  Clone ID: uC-tsrow189089d05b1
ttctcttccaaaatctgacctcatgaagaaaaagaacaaacctaagcttagcatgaaagagagtatgaaagttctgatctcttcaaaatacgtgagggaccttgctaccttagtcgttgcatatggcattagtatcaatcttgtggaagtgacatggaaatcgaagctcaaggcacagttccccagtccaaacgagtactcatctttcatgggtgatttctctaccgcaactggaattgcaactttcacgatgatgctgttaggccggattatattccaaagatttggctggggggtggctgccatgatcacccccacagttttgttggtgactggcgttggtttcttctctctgattttgtttgggcaaccactgactcccctgcttgccacgtggggtatgacccctcttcttgcggctgtttatgtgggtgcgttgcagaacatattta

SEQ ID NO: 10114 - DNA, 94 bp, Triticum aestivum
  Clone ID: uC-tsrow189089d06b1
tcgtgacctacgaacgaaacaggaaacagagagcgctctctgcgcgaacgacgccgaggaagaagaggaagaagaagaagcagagaggagcacg

SEQ ID NO: 10115 - DNA, 341 bp, Triticum aestivum
  Clone ID: uC-tsrow189089d07b1
aaccagaaacaccaggcgaacacgggggaacagaagcagaagcggacaccgcccaagacctaacggaagagacagagcaagaagccgggatgaaaaagcaaaccctggaacccaaaactgcagaaagagaaccggaacaagacagcggacccaagcaaactgttcaagtggaagatgtaaacgatgcatcaggtggacacaccaaggtggacagaaaaactgcagaagagataactatgactgaagtcgtgaatgagggagctgtggagacagaagctgtagcaccagaggaggaaactgtagaagaaaaagctaccgcagggacacagggggaagcacca

SEQ ID NO: 10116 - DNA, 321 bp, Triticum aestivum
  Clone ID: uC-tsrow189089d10b1
ttttcgcggggatgagggagagcatcgacggggactttgttggcggcgcgaggggcatctacatgacggaggcagtggccgcggcgtccaacaacggcggtggtgatgttttgcacgtgatgaaggagagctccgatgatgaccgacacgactactacgcgctgggaaggtatgacgcggcgatgaacacatggacgccgctggactccgatgccgatgtcggcattgggctgaggtacgattggggaaagttctacgcgtccaagacattctacgatccatcaaagaagcgacgcgtgctgtgggggtgggtcggtgaga

SEQ ID NO: 10117 - DNA, 162 bp, Triticum aestivum
  unsure (1)..(162): unsure at all n locations
  Clone ID: uC-tsrow189089d12b1
agacagcaagagcgggaagangaacccagaacagacggagcagggcagcgccgccgcccaggacgccgccgaggacgaccacggcgaggcgccagagaacaaggcggggcagaacgaggaggccgccgggcagaccggcgagggcagcagcagcggcgacaa

SEQ ID NO: 10118 - DNA, 414 bp, Triticum aestivum
  Clone ID: uC-tsrow189089e01b1
actgaacctctccacctacaaagcaggagctcagtctttggtgctgggatcgctctgctcgttcgacgactttggaaatggccaccaactcgaggtcgaactccagggccaccttctccagcgagatccacgacatcggcacggtgcagaactccaccacgcccagcatggtgtactacaccgagcggtccatcgccgactacttccctcctcacctcctcaagaaggtggtgtcggaggtggtgtcgacgttcctgctggtgttcgtgacgtgcggggcggcggcgatcagcgcccacgacgtcacgcgcatatcgcagctcggccagtcggtcgccggcgggctcatcgtcgtcgtcatgatctatgccgtcgggcacatctgcagcgcgcacatgaaccccgccgtcaccc

SEQ ID NO: 10119 - DNA, 467 bp, Triticum aestivum
  unsure (1)..(467): unsure at all n locations
  Clone ID: uC-tsrow189089e02b1
cctggcacctatggcgtatgccgcatggtatggacactgggctgagatgctcatccttgccgtgccctccttggctggccctgctctcgtcccatgccatgttaccacgctgtggatttggtttgctgcacgtttggttgagagcctcaacatacatagcggatttaagttgccattcaacgctgagaagtatataccgttctatggaggggcggagcaccatgactaccatcactacataggaggacagagcaagagcaacttcgctcctgttttcacctactgtgattatatntatggaacggacaagggctacagatatcacaaggcaactctggcaaagctgaaggagttggcaggcagcgacgttcagaaaggagtcgacaatggattcaacaatggaaagcaggactagagagaggttggcttcagaggactcatggtcatacaaatcctatcactaattc

SEQ ID NO: 10120 - DNA, 392 bp, Triticum aestivum
  Clone ID: uC-tsrow189089e03b1
tcgtactccgctcagccctagacgaaggcagaaagtttaaactacaggatctccaaggcatgtaatgaaagatattgaacatgatttcctagatttgaaggaacagggaggatttgatggaattaggatgctagatgtggtagaggaaactaacagattacatgatgaatatgatactatgacccctaaaagaagttcatgtagaagatatcaaaactggggttctgaatctccacccacgtctccgcgagttggttatggacagagtttgagtctccctgcaaggaggtcactagttgtctcctttgaggaatcccttttgtctggccgactttcttatggaaaagataatcagacaattgatggtttcttagctgtcctgaatattgttg

SEQ ID NO: 10121 - DNA, 452 bp, Triticum aestivum
  unsure (1)..(452): unsure at all n locations
  Clone ID: uC-tsrow189089e05b1
ctcgtagacgcgnggggcagcaaagcagaacccgggctcggtagagcccacggcctggccttcccctctgaagttcatcagcgagctcgacccggaagccaaggctctgctggaagcggccctgatggaggccaacagggagagggagaagaagatcttgaaggacgcaaagtgctcgccgcagtcccctttgcaatacgatgatgatcacatcgacgacgacatgttctcggaggtgagcgacacggagctgtgctgcatctgcttcgaccaggcgtgcaccatcgaggtgcaggactgcgggcaccagatgtgcgcgccctgcacgctggcgctgtgctgccacaacaagcccaacccggcgaccctgaccctgccctcgccggcgtgcccgttctgccgcggcagcatctcgcggctggtggtggctcagacccagacagcagacaacg

SEQ ID NO: 10122 - DNA, 391 bp, Triticum aestivum
  Clone ID: uC-tsrow189089e06b1
cacgctggctactgggactgggttgtgcactccttcaggatcaccaactgcggggtgcaggacaccacccagatccacacccacatgtgctactccaacttcaacgacatcatccagtccatcatcaacatggacgctgatgtgatcaccattgagaactcgcggtctgacgagaagcttctctccgtcttccgcgagggtgtggtgtacggtgcaggcattggcccgggtgtgtacgacatgcactcccccaggatcccgtccagaggagattgccgaccgtgtcaacaagatgctcgcggtgctcgacaccaacatgctgtgggtgaaccctgactgcggtctgaagacccgcaagtacgccgaggtcaagcctgcgctcaccaacatg

SEQ ID NO: 10123 - DNA, 182 bp, Triticum aestivum
  Clone ID: uC-tsrow189089e07b1
caccaccaacaacaaaaaaacacgcagggacgatacgaacaacccagccgcccctcgccggcgacgagagccaggccacggaggccgactacggcgagccgcgcgagcacccggaggagcagcagaaccggacgcggtaccagcccgagcggccccccagccgacagggcacaacagagagg

SEQ ID NO: 10124 - DNA, 77 bp, Triticum aestivum
  Clone ID: uC-tsrow189089e08b1
cggagacaccccaagaaaagcgaaaccgagaaaaaaaccgcgatccttagaaagccaatctggaaaaatggaaaggg

SEQ ID NO: 10125 - DNA, 362 bp, Triticum aestivum
  Clone ID: uC-tsrow189089e09b1
taccgcccacacgtgcgcccacgcgtccgacacaattcaacactagctagctgcacaggacacgagccgatccatccatccagaaaaaaagagtgcccgtcgaaaatgccggtgagcaggatcgccatcggcgccccgggggagctgtcccacccggacaccttccgcgccggcgtcgccgagttcatctccatgctcatcttcgtcttcgccggctcaggctccggcatggccttcggcaagctgactgacggcggcgcgacgacgccggcggggctgatcgcggaggcgctggcgcacgcgttcgcgctcttcgtggccgtgtgcgtgggcgccaacatctctggcgggcacgtgaaccc

SEQ ID NO: 10126 - DNA, 210 bp, Triticum aestivum
  Clone ID: uC-tsrow189089f01b1
tcttccacgcgagcgaaccaggcaaccaaggcgcacccggccaccacggcaacggccagggagccggacgagccgcacgccgcggagaagggcgaggaggcgccgcagcagcggcggcgcgccgacccgcgcgaggaccacagcccgaccgcggaccacgccgccgacgcccgggcggacccgaagcactaccacccggcgcacgccggg

SEQ ID NO: 10127 - DNA, 369 bp, Triticum aestivum
  Clone ID: uC-tsrow189089f02b1
tcttcgaacgagtactacggcgagccggcggcgcgcttgtgcctgcggtacgtcgggtacaagatcctgccggaggagagctccctggcccgcgagtacccggccggccaccccgtgctgacggaccccgccggcgtagcgcagcgcggctgggacgtgaccaagaaggtgtacctggaccggcagaacgtgcggctcgacctggcgcggttccgggaggagctggtcgccgcccaccggtacctcgtcgccggcaagcggaagggccggccgaaaaccaaacctattgcgatgtgatcggtccatataatcgtctgccgtagcaaacatgccgtatagcagtataccatagatcaaaatttacagaca

SEQ ID NO: 10128 - DNA, 387 bp, Triticum aestivum
  Clone ID: uC-tsrow189089f03b1
tcgtggacgcgtggggaagagactctcgaacccgatttctagcaaccgagcggcgagcggcgcgggcgcgggagctgccaaggagtgcgaccggcaaccggcaaccggcgcggcttgctgacgtctcggcgagggcgcgcccagatctactaaagcaatcacatggcaactctgaaagatgcagtagcacggaagcctatactggcaacaatccgcttgctcgttccagctggtgctgcccgccctgcaccaccagttggtccggcactgggtttctataggctcaatgtgatggcattctgcaaggatttcaatgcaaggacccagaaatataaggcagaaactcctatgcaggacaccctaaccgcctacaaagatagcactttc

SEQ ID NO: 10129 - DNA, 418 bp, Triticum aestivum
  Clone ID: uC-tsrow189089f06b1
ctcgtctacctgaagggctacaatgctataagagaggtctatccagacattcagatgatctcaaagtgggatggagcatctggaccacttgaccatcctgctgatctatatgatctccatgtctataccggatccagggcactattttgcatgaagaatacattggacaatacctctcgtagtgggcccaaggcttctgttagcgagtatgctgttacaggaaacgatgccggcagaggaagacttcttgcttcattggcagaggccgctatccttactgggctggagaagaatagcgatgttgctcatatggcaagctatgcaccgctcttcataaatgataacgaccgcacgtggaacccagacgctatcgtattcaactgctggcagcaatatgggactcccagttactggatgc

SEQ ID NO: 10130 - DNA, 198 bp, Triticum aestivum
  unsure (1)..(198): unsure at all n locations
  Clone ID: uC-tsrow189089f07b1
caccacacagcgcgcgcaccacagggggaacagccaggggaagcaacagcagcagcagcggagcgagcgcagggaccaacgcgcggccaaggggcgaggcaacggacaaggggangccggcggagaggaggagggagagggacgcggaggcggagcgcaaccagccgccgggcgagcgcgagcaccccaccgacgacg

SEQ ID NO: 10131 - DNA, 197 bp, Triticum aestivum
  Clone ID: uC-tsrow189089f09b1
ttgttcgcagacgcgcgcacacgcagacgagccagattcctacagcgcagcgcccctcctcccacgcgccgagcgcccgccgcccgccgaccgccggagaggacgccagggcgccggagccggaggacgacagcacggcggagaagaacccgcgcccacacgacgaagacgacagcggccaccagaagaccaacggg

SEQ ID NO: 10132 - DNA, 341 bp, Triticum aestivum
  unsure (1)..(341): unsure at all n locations
  Clone ID: uC-tsrow189089f11b1
agaagaagaagnnngngagcgatggcgttttttacgccgagctgaacgagatgctgacccgggagcttgccgaggacggctactccggcgtggaggtacgcgtgacgccgatgcgcacggagatcatcatcagggccacgcggacgcagaacgtgcttggtgagaagggccgcaggatcagggagctcacctccgtcgtccagaagcgcttcaacttcccggagaacggcgttgaactttacgccgagaaggtcgtcaaccgtggcctctgcgccatcgcccaggccgagtcactccgctacaagctcctcggtggccttgccgtccgcagggcatgctat

SEQ ID NO: 10133 - DNA, 421 bp, Triticum aestivum
  Clone ID: uC-tsrow189089g01b1
tcgtgagagcggcggcgaagatggagacgctgaagctgcttaagcgcctggcctctagcgtcctcaagtgcggcaagggcaaggtctggctcgaccccaatgaggtcaacgagatctccatggccaactcccggcagaacatccggaagctggtgaaggatggtttcatcatcaggaagcctcagaagatccactccaggtctcgtgcaaggagggcacatgaggccaagcagaagggccgtcactctggatatggtaagcgtaggggtaccagggaggctaggctccccaccaagatcctgtggatgcggaggatgcgcgtcctcaagcgccttctgcgcaagtaccgtgaggccaagaagatcgacaagcacatgtaccatgacatgtacctgaaggtcaagggtaacatgttcaagaa

SEQ ID NO: 10134 - DNA, 420 bp, Triticum aestivum
  Clone ID: uC-tsrow189089g04b1
ctcgtatcttcctcccccgccattaattgatcaagaaatgcttcagctaccagcaatggagcccatccctctcctcacgccgtacaagatgggccagttcgatctcgcccacagggtggtgatggcgccgttgacaaggcagcgctcctacggcaacgtgccacagccgcacgccgccgtgtactacggtcagcgcgccaccgccgccggcctgctcatcgccgaggccacaggggtctcggacacggcacagggctacactgacaccccggggatatggaccgctcttcttctgccagatctggcatgttggacgtgtgtccaccttcgagctgcagcccggtggcgccgccccgctgtcgagcacggagaagggggtcggcccgcagatgagcttcgatggccggctagaggagttct

SEQ ID NO: 10135 - DNA, 175 bp, Triticum aestivum
  Clone ID: uC-tsrow189089g06b1
gccggcgctagctctgcaccatcgccgcacgaatgctgcgccccccgacttcagctcaagggttcgaccgagagccaccggccggagctacccgggtagagattcctcgtttcatctggattactgggctagaagatagagccatgcagtgaatagtgcgtcagatccttcacag

SEQ ID NO: 10136 - DNA, 94 bp, Triticum aestivum
  Clone ID: uC-tsrow189089g08b1
acacgcgggcggaaacacagaaggaggacattgtgagagcagacaccccaccaccagcagagaggagggagaagcccgacgcgagagcgcccac

SEQ ID NO: 10137 - DNA, 258 bp, Triticum aestivum
  Clone ID: uC-tsrow189089g09b1
cgaaacccctctccaatctgagatctgcttacgtgcgcgacccggagcctaaaccctagagtagagcaggggcggcggccatggccatcatctcggacatccaggaggaggaggcgccgtcgcagcagccgcaagcggccccggccccggcggcggtcgacgtggacctggaggtcctcgaggcggtgctcgagcgcaagggcggcgcgctcccgttcctccacgcggccatcgacgtcgcgcaccggcgctccgacc

SEQ ID NO: 10138 - DNA, 365 bp, Triticum aestivum
  Clone ID: uC-tsrow189089g10b1
tttgtcgcgaaaccccgctccaatctgagatctgctgtcgttcgcgacccggagccgaaaccctagagtagagcaggggcggcggccatggccatcatctcggacatccaggaggaggaggcgccgccgcagcagccgcaagcggccccggccccggcggcggtcgacgtggacctggaggtcctcgaggcggtgctcgagcgcaagggcggcgcgctcccgttcctccacgcggccatcgacgtcgcgcaccggcgctccgacctgttgcgcgacccctgcgcggacggcaagatcaccgcgatggcctcggcgtgcagggcgcatgtggaggcggaggagaggaaggccagggatgccaagag

SEQ ID NO: 10139 - DNA, 274 bp, Triticum aestivum
  Clone ID: uC-tsrow189089g11b1
cgatggatccgcagcagccggagcccgtcagctatctatgcggagattgcggagctgagaacacgctgaagacaggggatgtgatccagtgccgtgagtgtggctaccgcatcctctacaagaagcgcacccgcaggattgttcaatacgaagctcgctgaagacagaagaacaaacatcattcactgttggtaggtgcctcgattgatgtggagtgtgccctgagacaaagctacaatggagaaatgtattatatacagtacttttaggtctt

SEQ ID NO: 10140 - DNA, 385 bp, Triticum aestivum
  Clone ID: uC-tsrow189089h04b1
atcgtgctggactacccgctgaggaaaagcatataaattagttgaggagaagaaacttacaaggattcccctagtaacggcgagcgaaccgggagcagcccagcttgagaatcgggcggctgtgccgcccgaatagtagtctggagaggcgtcctcagcgacggaccgggcccaagtcccctggaaaggggcgcctgggagggtgagagccccgtccggcccggaccctgtcggcccacgaggcgccgacaacgagacaggttgattgggaatgcatcccaaatcgggctggagactcctgccaaggctaaatacaggcgagagaccgatagcgaacaagtaccgcgagggaaagatgaaaaggactgtgaaaagagagtcaaag

SEQ ID NO: 10141 - DNA, 384 bp, Triticum aestivum
  Clone ID: uC-tsrow189089h08b1
accggccgcccaaactctattgcgacggctccggatggttcgaaggttaatgctgcggaggcatttaagatcgccggcatccagcacggcttcttcgagctacagcccaaggaaggccttgccatggtgaatggcacggcagtgggctcaggccttgcctccatggtgcttttcgaggcaaacgtccttagcctccttgctgaggtcttgtcggccgtcttctgtgaggtcatgaacggcaagccggagttcaccgaccacttgacccacaagttgaagcaccaccccgggcaaattgaggccgctgccatcatggagcacatccttgaaggcagctcctacatgatgctcgcaaagaagctcggtgagcttgacccactgatg

SEQ ID NO: 10142 - DNA, 346 bp, Triticum aestivum
  Clone ID: uC-tsrow189089h09b1
ttctctcggcagcagccgccgacagcagccgcgcaaaggctttacaaaccctaaccctagtccatagctagcggagcggccttcctctcgatctagctagagccatggcgccgaccaagggcgaggggccggccatgggcatcgacctcggcaccacctactcgtgcgtcggcgtgtggcagcacgaccgcgtcgagatcatcgccaacgaccagggcaaccgcaccacgccctggtacgtcgcctgcaccgactcggagcgcctcatcggcgatgccgccaagaaccaggacgccatgaaccccatcaacaccgactgcgatgcgaagcgtcttattggcagaag

SEQ ID NO: 10143 - DNA, 378 bp, Triticum aestivum
  Clone ID: uC-tsrow189089h10b1
acggcagcagccgccgccagcagctgcgcaaaggctctacaaaccctaaccctagtccatagctagcttagcttccttcctctcgatctagctagagccatggcgccgaccaagggcgaggggccggccatcggcatcgacctcggcaccacctactcgtgcgtcggcgtgtggcagcacgaccgcgtcgagatcatcgccaacgaccagggcaaccgcaccacgccctcgtacgtcgccttcaccgactcggagcgcctcatcggcgatgccgccaagaaccaggtcgccatgaaccccatcaacaccgtcttcgatgcgaagcgtcttattggcagaaggtttgctgatgcccctgtccagagtgatattaagatg

SEQ ID NO: 10144 - DNA, 303 bp, Triticum aestivum
  Clone ID: uC-tsrow189090a03b1
gtttcgttacccagaagaaagtcccggacaagttgctggatgacaccagcgtcacgcacctcttctcgattaccaagtacaccggcttgcttgccaccggcctcacagctgatgcgaggtccttggtctcccaagcaagaaatgaagcagctgagttccgtaaaaaatggggatacgagatgcctgtggatgtattagcaaaatggatagcagacaaagcacaaatatacacgcagcatgcgtacatgagaccccttggtgtagttgccatggtcttgggttatgatgaagagaaaaatgctc

SEQ ID NO: 10145 - DNA, 313 bp, Triticum aestivum
  Clone ID: uC-tsrow189090a05b1
ttatttcaatcccctctccgcgatctcaccgggaaattcctcgaccgattgaaagccaaggccctctcgtcctccttcaagatgcagatcttcgtgaagaccctcaccggcaagaccatcaccctcgaggtcgagtcgtctgacacgatcgataatgtcaaggccaagatccaggacaaggagggaatccctccggaccagcagcgcctcatctttgccggcaagcagctggaggatggccgcaccctggctgactacaacattcagaaggagtccaccctccacctggtgctcaggcttcgtggaggcatgc

SEQ ID NO: 10146 - DNA, 335 bp, Triticum aestivum
  Clone ID: uC-tsrow189090a07b1
tttcaacaatttcagcagcttacatcttatgcaacgactgtgaagccaatctatggagcctattttggtgttttcacgcttgtcttggttggggccgtctttgcttgttgcaagtttgcagggacaaagcgcgatggtggggtcccatatcagcagcttgagatggggtctcaggctcaagctcctgactcatcaggtgcaaacaacactacaagcacaggagatggctgggaagatggatgggatgatgactgggatgacgaggaagcacctgcaaaaccttcagaaagaggacctgctggaagcatctcggcaaatggcctttctctgagatc

SEQ ID NO: 10147 - DNA, 362 bp, Triticum aestivum
  Clone ID: uC-tsrow189090a09b1
tcgctgatatacaggacaggagtatcaaggaggaagacgaggaaacgttgatggccggcggtgaagagctgaagctgctggggtggtgggcgcccggggtgagcccctacgtgctccgcgcacagatggcgctcgccgtaaaggggctgagctacgaatacctccccgaggaccgctggtgcaagagcgacctcctcatcgcgtccaaccccgtgtacaagaaggtgcccgtcctcatccacaacggcaagcccatctgcgagtcgctgctcatcgtggagtacctcgacgacgccctcggccttcccggcaacggcaagcccatcctccccgcagacccctacagccgcgccctcgctcgc

SEQ ID NO: 10148 - DNA, 175 bp, Triticum aestivum
  Clone ID: uC-tsrow189090a11b1
tcgttcacgcgtccgccacgcgtccggtgatgcgtgattggtcgcggcggcgctaggtgctcttctccggccgcggcgagcgaggccatggggtgcatgcagtccacgccgaagcggaggcagcaccctgccggctacgaggaccccgtacacctggcctcccagaccgccttca

SEQ ID NO: 10149 - DNA, 84 bp, Triticum aestivum
  Clone ID: uC-tsrow189090a12b1
tcgttttaaaaaaaaaaaaaaaaaaaaaaaaaaaaagaataaaaaaaaaaaaaaaaaaaaaacaacaaaaaaaaaaaaggggcg

SEQ ID NO: 10150 - DNA, 367 bp, Triticum aestivum
  Clone ID: uC-tsrow189090b02b1
cctcacgcgtccgcacaacaggaatacacaagagaaaagaagacccaacggagctgaaatcaaatggcatcctccccttctttccttctcctcgctgctcttcttgccttggtctcatggcaggccgttgcctccgatcctggcccgctccaggacttttgtgtcgccgacatgcaatcaccagtgcgtgtcaatggatttgtctgcaagaacccgatggaggtcaacgctgatgacttcttcaaggcagccgccctcgacaagcctagggtgaccaacaaggttggatccaacgtcaccttgatcaatgtcatgcagattgctggactcaacaccctcggcatctcaatcgcgcgcatcgactatg

SEQ ID NO: 10151 - DNA, 295 bp, Triticum aestivum
  Clone ID: uC-tsrow189090b03b1
tttgttcctcccaagctgatgttgccgttttggtcattgcctctggtactggtgagttcgaagctggtattgcaaagaacggtcagacccgtgagcacgcctttttggctttcactttgggtgtcaagcaaatgatcgttgccgtcaacaagatggacgacaagtctgtcaactggtccgaggatcgtttcaacgaaatcaagaatgaaacttctggcttcttgaagaagatcggttacaaccccgagaagatccccttcatccccatctctgggttcaacggagacaacatgtt

SEQ ID NO: 10152 - DNA, 385 bp, Triticum aestivum
  Clone ID: uC-tsrow189090b04b1
gttatttctgtggtgtgagcatcaattggcacgtctcatcagacttcaacaagggctggagtgctcgggttacattgttcaattggggtgatgtcgacatggccaactggtttgctgccatggtcatggacaaggcgtatgacggatttgagaaggcatactctttcaatgcaacagcagagggcaataacacaatatttatgcagggccttgaggggctcaattaccttgtgaagcagaccaacatgagcgggtcggattaccttgtgccaggaaagcagcaatcagtgctctcattcaccaagaagctgactcctgatattgatgttgtcgctggagatgggttcccaacaaaggtcttcttcaatggtgacgaatgtgctat

SEQ ID NO: 10153 - DNA, 157 bp, Triticum aestivum
  Clone ID: uC-tsrow189090b06b1
tttcctatagaccttgctcatcgccactggctcctggaccataaagctcactgactttggcgttcaaggagcggaatcaaacaacatattgtatctaagggaaattgatgacaccgacaagttggtcgcagctatgcgagcgaagaaggatgggaag

SEQ ID NO: 10154 - DNA, 277 bp, Triticum aestivum
  Clone ID: uC-tsrow189090b07b1
tcgtatgcgtccgtcataatgactatacatggcattacattttcaatcacgccgataagcacctcggaaagagatcttggcactaaagatacaaccaaggggaaaaatactcactgagctgagccagacctcctcccttgactaaaaagttactgcacagttaccgtctttttctttagatactctagcggctgaaaagttttcaatgaagggcattttatatcatgtatttttggaatgtctttctctgagatgatgttggtgccaattaaaaact

SEQ ID NO: 10155 - DNA, 549 bp, Triticum aestivum
  Clone ID: uC-tsrow189090b08b1
tcgtttacgcgtggcggacgcgtgggtgtgcagaagcctggagagtttgttataacattccctcgttcataccattcaggtttcagccacggtttcaattgtggagaggctgtcaattttgctattggcgactggtttcctctgggctctctggctagcaaacgctatgcacttctgaacagaacaccctttcttgcacacgaggagctactttgtcgttctgcaatgcttctgtctcacaaactgagtgatccagaaacaattaattctgaacatccatacactcaatattgtgtgaagtcttcctttgcgaggttgatgcgactgcagcggcgcacacgcagcttactcgctaaaatgggttctcagatatactacaagccaaaaatgtattcgaacctatcctgtagcatgtgccggcgtgattgctatgttacacatgtgtcatgcggatgcacctttgatcctatctgccttcatcatgaacaagaactgcggagctgctcttgtaaatctgaccggattgtctacgtcagagaggacatactg

SEQ ID NO: 10156 - DNA, 471 bp, Triticum aestivum
  Clone ID: uC-tsrow189090b09b1
tcgttcattcaagcagcacctatgttggcaaactgaaaccaaacttccttggcacaaagttcacaatatttgatagccaacctccttgtgatgctgcggtgttgcctaacaacaagccaagcaaaaggcactcgaagcaagtatcaccaagactgccactaggtaattacaatgttgctaccgtctcatatgagctcactgtcctgcgcaaccgaggaccaaggagaatgcagtgcaccatgcactcaataccagccgtgtgcatccaggagggcgggaaggccccaacccctactggcatggtccactcactcgacgaacaagtgtccaccctatcaactagtagcaaaggaaaggaaccaaacatcgaattcttgtcaacaagcctcagcgctgatttatccggaccgatctcgaccagcgaagcgcctctgcttctgaagaataaagctccccgctggcacgagcagc

SEQ ID NO: 10157 - DNA, 447 bp, Triticum aestivum
  Clone ID: uC-tsrow189090b10b1
ttggtcattgtaaagaagaaaatattggggcgtttgagcgcccgtggcggcgttcgtcgccggccagaaaatcttgtgtccactgttcttcttccacctccgttcgagtgagaggagaggtagctagagggctgcggttccaacaattggtatcagagctggttcatcttgggtgtcgtccccttgccggaggcgtaccggcggtggcggcgttcggcggcggctgctcggtgaagctctgggccgtgtgtcagtctatggaggtgcgcggcgcggcgaggaggccgcggtggctgcggcggcacggtaaggaggccacggaggacctgcgtggtggcggcttcaacgacacacaacggcatggcggcatggaggtgccgcgctgcggctgaggccgcaacggtgcagggcaataagccgtggcggcttcaacgacacacagcggca

SEQ ID NO: 10158 - DNA, 353 bp, Triticum aestivum
  Clone ID: uC-tsrow189090b12b1
ttgcttcgcgtccgcccacgcgtccgcacaaacatgatctccttcacctctcaaccaagccaaggccaagagcccagtgaagcagcggccatggagggcaaggaggaggacgtgcggctgggcgcgaaccgctactcggagcaccagcccatcggcacggcggcgcagggcggcggcgcggacgagaaggactacaaggagccgcccccggcccccttcttcgaggccggggagctcacctcctggtccttctaccgggcggggatcgccgagttcctggccaccttcctcttcctctacatctcggtgctcaccgtgatgggcgtggtgggcaacccgtccgggtccaagtg

SEQ ID NO: 10159 - DNA, 327 bp, Triticum aestivum
  Clone ID: uC-tsrow189090c01b1
ttaacttggcgaagcgagtggattcggcatcaggatcacatccgccgatggccggcaacgagggtttcgccaccaagcgcgtgctggggcggtgcacggccgaagagatttcctccaatcccgcgcagcagaagtcagccatcgacgggttcggcacgccggagcgatgcgccaccgagcctacggcgttaaaccgcgagtatgctcttctgaaaaggaaggccaaggaggcagatcaggatcatgatgaagagcaggagcaggaaaaggagatcaatgagattctggccacggcaaaactccccagacgcgctgatgttgtgtctg

SEQ ID NO: 10160 - DNA, 401 bp, Triticum aestivum
  Clone ID: uC-tsrow189090c02b1
gtaaagggtacgcgtcttgcagtcatcctcagattcagaattccatatatcagataaggaattaagcgatgtcagagaagaagaagttaagaggaagaaaaggacatgtgtcttgcagtcatcctcagagtctgaattccatgcctcagacaaggaattgggtgataacaggatagaagaggccaggaggaagaagaggttactcgtctcgcaatcatcctcagattctgaattccatgtctcagataaggatgtcagggacttgggagaggctaaatctctggtggctcagcccatgctgtctgtgtcaccgaggaggctttcttttacaaggaatggatgggacaaaggaaaggagaaaaaagaactagtagatgctgggaagccctggtgtgggatat

SEQ ID NO: 10161 - DNA, 221 bp, Triticum aestivum
  Clone ID: uC-tsrow189090c05b1
tttcgtgtccgggcgacgggaaggacacgccgctcctgctcaatgaagggcaggacgtgtttacgttctacgccagcggcaggcgcttctgccagggggtgctcgccaccatggagatgcgcgcgcggcacgacctgctgtccaagctgctggagctggtcttcctcagtaaggacaccatcacgttcgaggtggtgatgaacgaggaccccatggaccac

SEQ ID NO: 10162 - DNA, 97 bp, Triticum aestivum
  Clone ID: uC-tsrow189090c06b1
tttgatatgggcgaccctggcatgccggcgaacaccgctgatatcactgggccgccggctcccaacacctgcgcggcctgctggcagcgccccctct

SEQ ID NO: 10163 - DNA, 317 bp, Triticum aestivum
  Clone ID: uC-tsrow189090c07b1
tcgtttccctccggcgccgcgctcgtcctggggctcttctgcatcgactccctggacgcccccgcccagaccggcgtcccggcgtacatctactacacctcctccgctggcgacctcgcggcgttcctccacctgccccaccacttcgccaccacggaggggagcttcagggacatgggcaaggcgcccctacgcttgcccggggacccgccgatcccggcgtccgacatgccgcacaccgtgatggaccgcgcggacccgatctgcaccatcaggatcgggcactacgggcgcatcccggaggccaggggcgtgct

SEQ ID NO: 10164 - DNA, 420 bp, Triticum aestivum
  Clone ID: uC-tsrow189090c08b1
tcgttgcgcctcgggcgtcgtctacaaggcgcgggaccgccgcacgggcgccaccgtcgccgtcaagcgcctccgcggcggcggcttctgcgaccacgacggcagccggctctccgaggacctcctccgcgaggccgcgtgcctcgaggcctgccgcggccacccgtccgtcgtctagctgcgggccgcgcaccgtgacggcgcgggcggcgcgttcctcgtgatggagtacgtcgggcccagcgtggcgcaggtcatgcgggagcgcggccggcccttccccgaggccgacgcgcgccggctcatgcgccagctcctggacggcgccagggcgatgcacgacctcggggtcctgcaccgcgacctcaagccggacaacgtcctcgtcgacgcccacggcgacctcaagatctgcgactt

SEQ ID NO: 10165 - DNA, 416 bp, Triticum aestivum
  Clone ID: uC-tsrow189090c09b1
ttcgttttcacatcttaagaagacttgataatccaaatgttattaagctcgaaggtttggcgacatcacgcatgtctagtagcttgtatctcgtgttcgaatacatggagcatgatcttgcgggacttgctgctacacctgacataaaattcacagaggctcaggtcaagtgttacatgcaccagctactgtctggacttggtcactgtcatagtcctggtgctttgcatcgggatataaagggtgctaatcttctgcttgacaataatggtgccctcaaaatagcagattttggtctagctacattctttaattcgaaccataagcagaatttgacaagtcgcgttgtaactttatggtaccgcaccccggaactttagctgggtgctactaactatggtgccactgtagatctc

SEQ ID NO: 10166 - DNA, 128 bp, Triticum aestivum
  Clone ID: uC-tsrow189090c10b1
tcgtgtttgcggaccaccgggcaggccaaaggagccgccttttcatttcttccttctcgggaggaagggagggagggttcttggggacgcgcatggaccatggcggcggcagcggtgggggtggaagt

SEQ ID NO: 10167 - DNA, 391 bp, Triticum aestivum
  Clone ID: uC-tsrow189090c11b1
tcgtgtttttctcggtgaatacaagtggacagtttgttggtgttgctgaaatgactggtcctgttgattttgaaaaaactctagagtactggcaacaagacaagtggaatggttcattctctgtcaagtggcacattgtcaaggatgttcccaacaacattctcaagcacatcgtccttgagaacaacgagggcaagccagtcacaaacagccgtgacacacaggatatcaaccttgagcaaggtatccagatgcttaagatattcaaagagcatgtcagcaagacctctattctggaagactttgccttctatgagaaccgccagaagttgatgcaggagaagagaataaaacaacagcagatccaaaagcaggtgtgggacagcagggc

SEQ ID NO: 10168 - DNA, 519 bp, Triticum aestivum
  Clone ID: uC-tsrow189090c12b1
ttggtatagggcaaagctgggtgggattccagttggtatcatagctgtggaaaccgagacagtgatgcaagtaatccctgctgaccctggtcagcttgattctgccgagcgtgtagtccctcaagcgggacaggtgtggttcccagattcggccgcaaaaacggcccaggcactgctggatttcaaccgtgaagagctcccgttgttcatacttgctaactggagaggcttttctggtgggcaaagggatctgtttgaaggaatccttcaggctggttctatgattgttgagaatctgaggacgtacaagcagcctgcttttgtgtacataccaaaggctggagagctgcgtggaggtgcatgggttgtggtggacagcaagatcaatccggagcacattgagatgtatgccgagaggactgcgagagggaatgtccttgaggcaccaggactcattgagatcaaattcaagccaaatgaattggaagagagtatgctaaggctggaccctgagttgat

SEQ ID NO: 10169 - DNA, 174 bp, Triticum aestivum
  Clone ID: uC-tsrow189090d01b1
gtaaatacgtggttggtggagacaattcagagccctctgattgtgtatctgactttaagaatccagcgacgccagaaaagaagaagttaagaggtacaaaaggacatgtgtcttgcagtcctcctcagagtctgaattgcatgcctcagacaaggaattgggtgataacaggat

SEQ ID NO: 10170 - DNA, 373 bp, Triticum aestivum
  Clone ID: uC-tsrow189090d02b1
tgtggatcgcaaggctgccgaagcctgggccgccctgaaccgcctcccgctcgttccctcggtgacccgtgccgtcctccccacagctgcacagctctcagccaagtacaactctgccgtgctcgatggcgctaagcgtggcaactccgtcgccacctacctgccactcgtcccaacagagcgcattgcaagggtgttcgccaacccgtctgctgatactgcgcctgccacagctcctgagatgcagcccatcccgacgcagtaacaataagagctacccgttgttatgttacctaatagctgttaggagtcagtatctcgttgtgtagtgtcttgcttggcttgtggtggacagcggtaatatgtgtggatg

SEQ ID NO: 10171 - DNA, 290 bp, Triticum aestivum
  Clone ID: uC-tsrow189090d04b1
tttgttcagcaaccaacaagctagctagcgcgaccgagcaagctaaactgagatcaagatcgaattgattgatcttgttggttctacttctcggtagcaaatcaagatggcgtctgcttctcccgcgccagcgacgctgctggccgtgtgcgccttgctcgccgccatggcgctcttccagggcgcgcgggcgcagcagctgagcccggcctactacgacgagtcgtgcccgcacgtctacgacacggtgcggcgcgtcatccaggaggcccgcaccgccgacccgcgca

SEQ ID NO: 10172 - DNA, 178 bp, Triticum aestivum
  Clone ID: uC-tsrow189090d06b1
tttgttgtggaccccgcgtgcccctccctggaaagcctggctcgggctagggcacgcagccaccacccatacccccaccctgaccgatcgcgtcctcccattcttggaccttaccttgcctgctcgccctttttatggcctactactgccgagtgcacccctactactgactgaaccc

SEQ ID NO: 10173 - DNA, 193 bp, Triticum aestivum
  Clone ID: uC-tsrow189090d07b1
ttgcacactacgcgtaaaagactctgggtgcggcttgagttcacctttgctggattgcagctcatgtggagctacagtgagaatctgggactacaaatgcgttccactctcttctgatcttaatctcgggaacattgatgcacctgatgcagggacgaaacctatgttggcacgtctaattagcgctaccagt

SEQ ID NO: 10174 - DNA, 149 bp, Triticum aestivum
  Clone ID: uC-tsrow189090d08b1
tcgttccaccctcggcggcctccaccccaggatcgtctccaacaacgccgactgcaccatggacatccataagatcgttggctccatgaggagcccggatgggcatgtgtgttatcccaccacccggctcatatgcttggagaacacac

SEQ ID NO: 10175 - DNA, 389 bp, Triticum aestivum
  Clone ID: uC-tsrow189090d10b1
tcgtgtttcctgctagggttttggtcctttgttttcggcggcgcaagatgggggagagggtcaagggaaccgtgaagtggttcaacgtcaccaaggggttcggcttcatctccccggacgacggcggcgaggaccttttcgtccaccagtcctccatcaagtccgacggctaccgcagcctcaacgagaacgacgccgttgagttcgagatcatcaccggcgacgacggacgcaccaaggccaacgacgtcaccgcaccgggaggaggggcgctctccggcggctcccgccctgtcgaaggcggtggtgaccgcgggggccgtggcggctactgaggcggcggcggtggctacggcggcggcggtggcggctacggaggcggtggtggc

SEQ ID NO: 10176 - DNA, 499 bp, Triticum aestivum
  Clone ID: uC-tsrow189090d12b1
ttgtgtgaccgtgacctccctgcccgacgagcgctctacgatggcatctcaggattccaagcccgcgcaagtcccggccgccgccgagctgacggccccggcggctgccgccgcaggggaggcgccgaatcccacttccccgacagcggcccaaaaccctagcgccgccgccgccggtggggcagccacggatctagagaagaagatgcgccgcgcggagaggtttgggacgcaggtggttatgtccgaggacgagaagcgaagcagccgcgccgagaggtttgggactggatcttctaatgaaaagatggaggaacagaagaagaagtccagggctgagaggtttggccttcccacgccctcctctgatgataccgaggctaagaaaaaagcccgcttagagcgatttggtcagagcacagaagttggcaaggcggaagaagagaagcgaaaggcacgggcccttaggtttgccggagcagcacctagtgggtcatct

SEQ ID NO: 10177 - DNA, 419 bp, Triticum aestivum
  Clone ID: uC-tsrow189090e01b1
ttactcgtccgcgactccttcgccgacatcctcaagctctacgagggtggcatcaagctgcccgacatcccggccctccaggagatgcgcaagcgcttcccgctccagctcgtcaaggacctcatccccatgggcggcgactacctcctcaagccccccaagccacaagtcatcaaacaggacgagaaagcatggatgaccgacgccgagttcgcaagggagattctcgccggcgtcaacccgatgatgatcacccgtgtcacggagttcccccccaagagtactctggatcccagccagtacggcgaccacaccagcaccatcaccgaggcgcacatcgggttgagcctggagggcctcaccgtgcagcaggcagtcgctagcaacaggctctacatcctcgaccaccacgaccacat

SEQ ID NO: 10178 - DNA, 351 bp, Triticum aestivum
  Clone ID: uC-tsrow189090e02b1
ttcacgcgtccgcgactccttcgccgacatcctcaagctctacgagggtggcatcaagctgcccgacatcccggccctccaggagatgcgcaagcgcttcccgctccagctcgtcaaggacctcatccccatgggcggcgactacctcctcaagccccccaagccacaagtcatcaaacaggacgagaaagcatggatgaccgacgccgagttcgcaagggagattctcgccggcgtcaacccgatgatgatcacccgtgtcacggagttcccccccaagagtactctggatcccagccagtacggcgaccacaccagcaccatcaccgaggcgcacatcgggttgagcct

SEQ ID NO: 10179 - DNA, 90 bp, Triticum aestivum
  Clone ID: uC-tsrow189090e07b1
ttcggtggcagttgtccaaccgaacgggggcgaggtatggactagaagctgcgcgacccgaccaagggcctcggagccgggggcatggac

SEQ ID NO: 10180 - DNA, 325 bp, Triticum aestivum
  Clone ID: uC-tsrow189090e08b1
ttaaggggaagtgggacccggcgatccggatgccttggtaggaggagcccgccacggccgaccagagctccgagaagggggaggacggcctcgggacgaggtgggcggtactcgtcgccggatcctacggctacggaaactacaggcaccaggccgatatatgccatgcctaccagatattgagaaaaggaggcgtaaaagaggagaacatcgcggtgactatgtatgaagacattgccaacaaccttctcaacccgaggccaggggttatcatcaatcacccataaggcgaagatgtatatgctggcgttccaaaggactacac

SEQ ID NO: 10181 - DNA, 505 bp, Triticum aestivum
  unsure (1)..(505): unsure at all n locations
  Clone ID: uC-tsrow189090e09b1
tcgttacgcgtccggcagcttaaggagacagcaaaacgtaatccctcattatcgaatctaacaagttcagcctcggagagaatatcagagctgcaagaaaagattggagaatctgaatttgacagggatctgttgcagattgtagaaaagattgcgtccggatcttctggagacttatatcgaggaacttaccttgatgtggatgttgcaataaaattccttagaactgaacatgttaacgataattcaaaagtggagtttttgcaagaaataatgattttaaggagcgttaatcatgaaaatgtcgttcgcttttacggggcttgcacaaaacagcgaaagtatctcattgtaacggagtacatggctggaggcaatctgtatgacttccttcacaagcataacaataccttggagctttccttgattcttaagattgctattggcatctcgaaagggatggattatntgcaccagaataacatcatccatagagacttgaagt

SEQ ID NO: 10182 - DNA, 418 bp, Triticum aestivum
  Clone ID: uC-tsrow189090e10b1
tcgttgcctccaccttcttcttccaccgaggcgccatggccaacctccccggcggcgctcccaacgccaagcaccacctcccaccgcgacgtcccctccgcgcaccacggcgtcccctcctgtggtgctccccccgtccatcctgcgcgccgacgaagccatccacggcctccccgcgatgagccaatgccaaatccggtcagccgcgggctcccacgacgggccgttgatggatccaaccatccacggccttcggcgatgcgctctctccggatctgccccgcgctcctcccccggtcccctcccacctcacgccccaacccctccaccttatacaccgattcgccgccggtggcccgagccgccgtagcctccacaccgcacttgtcttggagctcgcagtgactctccgcacgag

SEQ ID NO: 10183 - DNA, 391 bp, Triticum aestivum
  Clone ID: uC-tsrow189090e11b1
tcgttaacatttgcctcttcctccctccctccgtacccccctccccctctctctctcccaacgcccgtccatctctccggcgaaaccgatggccgcgagctcaggcgacgagtcccggaggcccaatcccctcccctcggggctcgtgtccaatctgcagtccgtcctcgcctcccgccgcccgccttcgcccgaggacgccggctccaccgcggccgaggccgaggccccgacagcggagacggcggccgatgacgcgccggctaagcctgtcgtacttctgacctgcgccggcgggatccagtcgccgggtctcgtggcgctcgtcgacgccctcgtcaagggcggccgatgcgacgtccacgtgtgcgcccctgaatcggacaagcct

SEQ ID NO: 10184 - DNA, 424 bp, Triticum aestivum
  Clone ID: uC-tsrow189090e12b1
tcgtttacgcgtccgctgatgggccttccgttgagtataagggagttgttccagcagatcagttacaggataagaaaatccagttggaaaaggaggcgaatgaactgattttgaaaggaagcaaggttttggtctctgtttttccttatgaggaggcggctaagttatgtggaggtgctctgcctagctacatttcacaagacagcactccccgcattgtgaaatttggtgactatcctggttgtccttgtggaggcactcatgtagctgatatcgcagacatcggcaacctaaaggtcacaaatatacgggtcaagaaaggcgtgactaaagtctcctacagcatcaacccgtaattttttctgcgcaactctcgcacccagaatttgtcagagtagaggaaggataattatctagagaatca

SEQ ID NO: 10185 - DNA, 334 bp, Triticum aestivum
  Clone ID: uC-tsrow189090f01b1
gtacatggagggtatcccaccggaccagcagcgtctcatctttgctggcaagcagctcgaggatggccgcacccttgcagactacaacatccagaaggagtccactctccacttggtgctcagctccgtggtggtatgcagatcttcgtcaagaccctcaccggcaagaccatcaccctggaggttgagtcctcggacactattgacaatgttaaggccaagatccaggacaaggagggcattcccccggaccagcagcgtcttatctttgccggcaagcagcttgaggatggccgcacccttgcggattacaacatccagaaggaatccaccc

SEQ ID NO: 10186 - DNA, 391 bp, Triticum aestivum
  Clone ID: uC-tsrow189090f02b1
gtgactttttccgccgccgccgcccctagctccagcgccctcgccgtcggtcgcagccaagcccccgcttcgagcttcgcgatctccctcgccgaccaacatgggtaagacacgtggtatgggagctgggcgcaagctcaagacccacaggaggaaccagcggtgggctgacaaagcctacaagaagagccatctggggaacgagtggaagaaaccctttgctggttcatcccacgcgaaggggattgtccttgaaaagattggcattgaagccaagcagcccaactctgctatccgtaagtgcgctcgtgtccagctggtgaagaatggaaagaagattgccgcctttgtgccaaacgacggttgcctgaacttcatcgaggagaatgat

SEQ ID NO: 10187 - DNA, 303 bp, Triticum aestivum
  Clone ID: uC-tsrow189090f04b1
ccttctcctccgcctactcttttttcccccagctggaaccaaaatccgcgttaaattcgcagaattcattagcgggcgtcgcctctgagtgtggcctcaaagcttagctcaagatggtgcttgctccgatcattcatgaactcttcctgcgtgcgtgcgtgcgtggctgtgtggctcagagcttagctttgctgctttgaccatggcggtcgtggctgtggcgccgcggctggtgcttctgctgctgctgagccgcgccgggcttccggcggccgtggggctcggggtgaactggggcacgat

SEQ ID NO: 10188 - DNA, 274 bp, Triticum aestivum
  Clone ID: uC-tsrow189090f05b1
gttatttccgcaaaacggatccgcaacttcgggaaaaggattggctctgaggactgggctctggggtcccggccccgaacccgtcggctgtcgatcggtgagtacgaccacgtgagggagctcatcaagtggggaacggactacctgctgctcacctttaactcgtacgcctccaccatcaacaagctctacagtcaggtgggtactgccaagatcaacggcagcacgccggacgaccactactgctggaaccggccggaggacatggcgtacc

SEQ ID NO: 10189 - DNA, 272 bp, Triticum aestivum
  Clone ID: uC-tsrow189090f07b1
tcgttacgcgtccgcatcccggccccaccaccggcagtacctactctcttggtgtgaacaacgaagcggaagcagtctaactagctcttgggcttaactgattatctgaatcttcatttggtactcttgatcgatgataatagattatagctgattgcaccggtgattagcacagtatactcatgtttgtgtggaaatggaaccacgagtagtagcactagtatagatacgtacaataaaatgtggtagcggtggcttaagtttggtcaatg

SEQ ID NO: 10190 - DNA, 341 bp, Triticum aestivum
  Clone ID: uC-tsrow189090f08b1
tcgttttgctgttggtgtcatcaagggcgtggagaagaaggaccccaccggcgccaaggttaccaaggctgccatcaagaagaaataggcgtgctatctagcagaatgtttttgttcacggtcattgcttttgttgcttcagactcttatcccgagcgagcaatgatctgtctgtcgtttaattactgtatttctattcctgcgtcggctaaactcctgtgcccctgagactgatttgttgtgaaatgcacgttattagattgcaacttgttagcttgtttttctgctgcttttgccaaatggttgcctgcttaagatgcttctttatatcgaactttaaa

SEQ ID NO: 10191 - DNA, 473 bp, Triticum aestivum
  Clone ID: uC-tsrow189090f09b1
tcgttgacgcgtggggataaactgatatggagatggattgcagaagattttattcatgataagcaaagggggaacttatataaacaaggagaaaactacttcaatgagttgattaatcggaatatgcttcagcctgttgatattgacactcatggtagtgcaaaaacatgtcgtgtacatgatatggtacttgatttcatcacctcgttatcagccgaggaaaattttgttactatactaggaggtcagcagccattgtctacagggaacaagatccgccgattatcagtccaaaagaacaatggagagcacaatatgcttgataaatccatggacttatcccatgtaaggctactttttgtcttgaggtctgctattgacatgattccatcacttttgagcttccaggttctacgtgtgctggatctcgaagaatgccaacatttggatagttgttatttgaaggacatcac

SEQ ID NO: 10192 - DNA, 420 bp, Triticum aestivum
  Clone ID: uC-tsrow189090f10b1
tcggttagaagaaccgggagatctcatagatcttgctctgtcaatggggggaaaaggatacaatttaactttgcaaaggtgttgaggggaaagaggaggagaacggttggggaaaggcattgttgtgctgacatcagaatggagcctgatagaagcataactaatgaaccttaatccaagtttgattataagcacatcattgtttgtcacaacttttgatgtgcattagatatttttcaattgtaaaaagtaatactgtttgcatgtacattaactttgtttttcgcttagtttgagacgcttctttttctttttagtgacgcaaaattgtttagttttaattgcttactgttactttactttgtaacgagttggattcacattcgagattgtttccaagaaataaagttatgttgatgt

SEQ ID NO: 10193 - DNA, 365 bp, Triticum aestivum
  Clone ID: uC-tsrow189090f11b1
tcgtttcctcctgctgctgctacacccccgaagaacaaaattagcaggtacaacagcggctgctcctcctgctgcttgctccactcaacacgaggagatctagaggagtcgatgactggcagtgccgtctttaaccggaagcactgtgccacattggataaaaagaagacaccaacagcaggatatatcaaaagtgttttcgatgatccgtgttcttctattgcttctcttgccatatgtaccccaatgggcatcagtgagagcattcaacaataagactgatgtggattccttgctagtgttcaaggcaagcattgccaaccaccatggtgtcctagctgcatggaacacaagtactgacttct

SEQ ID NO: 10194 - DNA, 378 bp, Triticum aestivum
  unsure (1)..(378): unsure at all n locations
  Clone ID: uC-tsrow189090f12b1
tcggtttgaaacaacttgccagcagcgccagtgtgcagcgatccagtgaccgacacggacaagaacaagatggtcgccggctgtttcatcaccgacgagtgcgccctggcggtgtcgacggagcggatgtggaaggcggtcttctccggcgaggacacggccgtcctgcccaaggcctgcgcgggcttcatcgacgccgtggacgtcgagggcgacggcggacccggcagcgtctccaccatgacgctcagcccggcggcagcggagctcgccggctcgggcgtgatgaggagccgcctggtggcgcgcgacaancgcggcccggtgatcaagacggagctgctggagggcagcaaggtgagcgcccagctcaagtcg

SEQ ID NO: 10195 - DNA, 328 bp, Triticum aestivum
  Clone ID: uC-tsrow189090g01b1
ttatcgtttccgcaagagggggcggagggacggcagtgcaccctcgggaaagagaaggcggcgatgatctagtgttccctgaggaacaaactcgtttggcggttgacaaccaaagggaagccccagacgtacccgtttatctcatccagtgtgtttgcgcctagttatagtagcccaaaacgtaatagaggtcaccctcaagtctgaaccagttaaaagagaactccgaagtctgaactcctatgttacatagattccagtgacatggtgaacttatgtcggttaatgtactgtccctgtgtttgtggatcaattaggttgttaaaaa

SEQ ID NO: 10196 - DNA, 234 bp, Triticum aestivum
  Clone ID: uC-tsrow189090g02b1
tttgttgtcacaggtcacgtgcctgcgctgcgggggtgtcgtgctcgggctggcactgcaccactccgtcgtggacgcccgtggcgcggcgctcttggtggagacctgcgcgagcgtcgcccgcggctccactaaagaggacgtgcccctgccggctagcttggaccacaggctgctcgcggagcgccaagagcgctcggtgccgtacgaccacccggagtacaagccggagcc

SEQ ID NO: 10197 - DNA, 413 bp, Triticum aestivum
  Clone ID: uC-tsrow189090g03b1
tgtgcgtcccatcaatcgccatggcctccgtggacctgcaacgcctgcgccacatgttactcaccaccggcgccgccgccgccggcggtcaccaccagctcgcctccgccgctgctatgccagcaagtgagccttgttatggctctgcggcgtcgtgcgagcgggggcaccagccgtacgcggacatcttcacgctgccgccgccgacgacgatgacgccggccccgtgtcagtgttcagagttcttggcgatggccgcggctgatctggcgaagaagggcggcagccccgacggtgttcaggaaatgatcaccaagaagcggaggcgtaacgacgttcttgcggcccacgcgcagcagcagaccatggacgtcgaccgcatcctgctaaaacatgcgaaaaatatgtggact

SEQ ID NO: 10198 - DNA, 275 bp, Triticum aestivum
  Clone ID: uC-tsrow189090g04b1
gcgttgactacacccctgagtctgccacggagctcgttgtcctcttccttggcgacacctccaagggccacaggcccggccagttcaccaacttccagctcaccggttccagcggcatcttcaccggcttttccacagagttcgttggccgtgcctgggacctcaaggaggacgatgcggccaagcttgtctccagccagcctgcgtctggcattgtgaagctcactgctgggcagaagctcccagtgccggtcgatgcggaccgcaaggacatg

SEQ ID NO: 10199 - DNA, 251 bp, Triticum aestivum
  Clone ID: uC-tsrow189090g05b1
cttcgttccattcgattcgatctcggcttcctctccaagccacgcgacgcgagaccagagctccggccatggcggcgacgatccagtccgtgaaggcccgccagatcttcgacagccgcggcaaccccaccgtcgaggttgatgtgtgctgctcagatggaacctttgccagggccgccgttcccagcggtgcatcgactggtgtctatgaagctttggagctgagggacggtggatctgactacttgggc

SEQ ID NO: 10200 - DNA, 235 bp, Triticum aestivum
  Clone ID: uC-tsrow189090g06b1
tttgcattctaccaccagaccgaccgcacagttgaagtgagatctgcgctaagggctcatcagcaaccatgaagagcaccaagctcgcggcgatcctgatcctccaggccgtcctggtcatggggatcctctcacacgtgaacgccgactatttacccaagagctgcaacaactgcaggtccttctcgggggtcgacgcctgcgacgacgcccacccccagtgccccaagggctg

SEQ ID NO: 10201 - DNA, 429 bp, Triticum aestivum
  Clone ID: uC-tsrow189090g07b1
tcgtacatcggaagacgagagaacagaagagccaaggacactaaaacgaagtggcatcctcctcttcctttctcctccttgctgcacttcttgcgttagtctcatggcaggccactgcttttgatcctagcccactccaagacttttgagtcgccgacatgaattcaccaggaactatccgttttgtcatcatgtcttcaccaaatacatatgttgaaatctatttccggaaattatatccaagtcgaaacaactttgtaaaatctgagcttacatgtgtatatcttgcgcccccagtccgtgtcaatgggtttgtctgcaagaaaccgatggaggtcaatgcagatgactttttcaaggcggccaacctcgacaagcctaggctgcccaacaaggttggatccaacgtcacattgatcaacgtcatgc

SEQ ID NO: 10202 - DNA, 267 bp, Triticum aestivum
  Clone ID: uC-tsrow189090g08b1
tcgagctgctccagcctccagctaccactttcagttttctcgttagttactctaccagcaatagcaacagaggaggaagagcttattggtgtggtcagtaaatcatggctgtcgtgaattttgtcaagccgaccattgggcagagtccaaagctacaaggtcgtactccgaggaggggcagcggcatggtcaggagctcgctgcagggcgccgtcgtcgggaacaggacggagtggctgaccagctgcgcggtgctctccagcaagg

SEQ ID NO: 10203 - DNA, 434 bp, Triticum aestivum
  Clone ID: uC-tsrow189090g09b1
tcgttcactcccccccctccctcctcctcttgtcacaatcaatcaagaacgtactggaaggaaggaagaggaggaagaaccaagaaagaaccgcctctcttaacgagaacgcagagtctcttttgaatctttgctagctgcggaaaggccttcttccgtcatgtgctctggtccgcgcaagccgtcgaccccgcctccggtggcggcggcgccgaaggattcggcggccatggcctcgcttctcctcgagctggcggcggcggataacgtggtggagttcaggcgggtcgtggaggaggagaaggcgtcccttgatgctgcgggatcgtggtatgggccgtcggctgttggccttggccggctggccgcggagagccggactccggctatggtcgccgcgctctacgggagcacggccgtgctggcgcacgcgc

SEQ ID NO: 10204 - DNA, 421 bp, Triticum aestivum
  Clone ID: uC-tsrow189090g10b1
ttgctcacgcgtccgcggacgcgtggcgctagggttttgggattttagcctccagcgccgccgccgccgcccagcgaattcgacaagcccccgagctcgccggatccgatggccgtcacgttctccgacctccacaccgccgacgggctcaaggccctcgaggcgcacctcgccggcaagacctacatctccggcgatgggatcaccaaggacgacgttaaggtgttcgcggcggtgcccgtgaagcccagcgccgagttcctgaacgctgcccgctggtacgacgccgtcgccgcggccgtttcttcaaggttccctggccaggcctctggggtgagtgcatcctcggctcctgctgcagctgctcctgctgcttccaaggatgaagatgatgacgatgacatggatctgttcggcgatg

SEQ ID NO: 10205 - DNA, 411 bp, Triticum aestivum
  Clone ID: uC-tsrow189090g11b1
tctgtttagcatattatgctgtagaagaggttaaagagaatgctactcagaaaagtcagaaggtgttcgtccacgtgccatcagaaattgcggcccatgaagtcgaggaaattggagttgagcaccttctgagggatgtgaaagacacaacaataagcacacttgccacagaggtcagcagcaagcttgcagccctgaagggactcgatgcgaggcttacggagatccggggttatctagatcttgtaattgaagggaagctcccactgaaccatgagattctgtaccacttgcaggatgtgtttaatctgctccccaatctcaacgtaaatgagctcattaaagcctttgcagtgaaaacaaatgatatgatgctggtcatatacctgtcttctcttatccggagtgtca

SEQ ID NO: 10206 - DNA, 406 bp, Triticum aestivum
  Clone ID: uC-tsrow189090h01b1
ttctcttacctctccacaaaaagttcaatggatctgcagcaattaatggagcatcaactgttcgacgatggcgccgtcccgagctgcatgatctcgccgttagaggcagacaacggtttcaccgacgagctgccgtctttgcagttaccggacctggaccttgacttcgacatccacgagttctccgcaccggcaacggcaccggcgaaagcggccacctcaggtggctccggattggttggttccggttcgggatcgcacaagaagctcaaccacaacgcgtacgagcgcgaccggcggacgcagctcaatcagctctactcgactctgcgttcactcatccccaacgcagatcacacaaagaagctgagcattccgacgaccgtctgtcaggtccttgactaca

SEQ ID NO: 10207 - DNA, 374 bp, Triticum aestivum
  Clone ID: uC-tsrow189090h02b1
gtcgttgcctcgcaccaaaacacaactaccaccagcggcagcagttcgactccggagaggcagagatgggctccaccgcaaccgacatggccgcctccgccgacgaggaggcgtgcatgtacgctctccagctcgtctcgtcgtcgatcctcccgatgacgctcaagaacgccatcgagctgggcctcctggagaccctggtggccgccggcggcaagctgctgacccccgccgaggtggccgccaagctcccgtccacggcgaaccccgccgcggcggacatggtggaccgcatgctccggctgctggcctcgtacaacgtggtgtcgtgcacgatggaggagggcaaggatgggcgcctgtcccggcggtac

SEQ ID NO: 10208 - DNA, 254 bp, Triticum aestivum
  Clone ID: uC-tsrow189090h04b1
gtcggtttacgggctggctgagctctgctccgacgccgacgggctccttgacaaggtgcgtgtcatccaggccgacacgctgagcatgatccagggtggcttcaccggcgggagcaccacctccgagaccagctgcgaggcggtccgtctgtcgtgcgccacgctcgtggagcggctcaagcccatcacggagagcctcgagtccaagtccggcgcccctgcgccatggaaggccttgattacccaggcgacca

SEQ ID NO: 10209 - DNA, 236 bp, Triticum aestivum
  Clone ID: uC-tsrow189090h05b1
ctcacgtttccgctccacctgcccgtgctccaccgcgtggttaccgtggggttcgacgagctggacggggagctgcacgtgcccgggctgccgccggtaccgccggagtgcttgccgtgccccgtggtggacaagaagagccccaactacacgtggttcctgcgcctcggcggcagcttcatggacgccacggggatcatcgccaacaccgcggacgggctcgagccggggcccct

SEQ ID NO: 10210 - DNA, 299 bp, Triticum aestivum
  Clone ID: uC-tsrow189090h06b1
gttagttaaagcgttttataacacccctgatgctgatagagagtatgtgctgtactgggaaaagatggtcaaggaaatgaagtggcttgaaaatcatgtgcttaaagattttctggagtgggagccaatgcgccagaaaggtttgtaccaatcaattaagattgccaatgggttcagcaacattcatttgggtctagcatgtcatggcttcgaggagtatgtattgaggactcgcctttatcgtctgtttgtggaaagtcttgaccgtgcctttcttgagatttggaagcgggtcaatg

SEQ ID NO: 10211 - DNA, 374 bp, Triticum aestivum
  Clone ID: uC-tsrow189090h07b1
tcgttaacgggagtagcggtcaacaagatgctgacgggactgggtgtaatagccaggcagaagatttaactgtgagccaaagaagcgcaagtttgtcagtcagtatggatgattccacttgtgaccctaacacggagaagcttgggtcagatggaatgcagcgatcaagcagcggaactcaggcaaatggccatctcgacgaggatccagtcagcagtgataattccagccaagctatttccaaaaatgctgacaagaagatatcactgctaggacacgggcaccacggtaaacaagtggtcgagcttttgctggccaacggtggggaggaggccgttcaccagttttgccaaagatggaggcatgttttcgtc

SEQ ID NO: 10212 - DNA, 463 bp, Triticum aestivum
  Clone ID: uC-tsrow189090h08b1
tcgttgacgcgtgggttcgtcttcgaatgtgcaccgggtacgaatgccacttccattgaatgggatggtatttaccactacttggtacaacatggtcgtgatcgcatcattgcgggtgactattccaagttcgacaagcgcatgagtgccatattgattctggctgcgttcaaggtgatcgtcaatattttggcggctgcaggttggaacgatgaggatcttcacattgtgtggactatggcgtttgacatcgcattcccagttgctgatcacaatggtgatctcgtgcaatttctgggatcgaacccctcgggacatcctttgacggtgatcatcaacagcatagtgaacagcttgtatgtgcgctatgcttggtgtacgtcaaatcacaaccttgaggatttcgtgaagtatgtggctctgatgacatatggtgatgacaacatcatgggtgtgagtcgtg

SEQ ID NO: 10213 - DNA, 381 bp, Triticum aestivum
  Clone ID: uC-tsrow189090h09b1
tcgtttcacgcgtccgcttcttaaccaacaccaagccaagtaggcaacccagagtcgagtcctcgggaccccgagctcttgcggatgggttgcctgcggcgccggccggagccggcggccatcgacatcacctgggtgtcgcgccggggcgtcaggtcgtcgctcccgttccacacgccgtgcctatacgcctccgtctccgtcacgccgtcgtctgccggcaagaacgtccgccgccaccgcgtcaagacccccaccgaccgcgccggcggcgagaaccccgagtgggacgagcgcctgcggctccgccttcccgacgacgcctcgctggcgtcagagcaggaagccgcggggaaaaagaaggacgggcacgttgaccac

SEQ ID NO: 10214 - DNA, 406 bp, Triticum aestivum
  Clone ID: uC-tsrow189090h10b1
tcggtgtcctcctcctcgtcggcggccatgatccaggcggtgatggttatcagcactctgggcaagccccgcctcctcaagttctacaatttccaggattcggagaagcaccaggagctggtccgcggcgtcttccagttgttatctgcgaggcccgagggtgtgagcaatttcgtcgaggctgttgcaatctttggaccgggaacgagactggtctacaagcatttggcgacactatacttcgtctttgtctttgatagctctgagaatgagcttgccatgctcgaccttgtacaagtttttgttgaaacattgaataggtgcttcaagaatgtatgtgagcttgacattgtatttaacttcaacaagcttcacacagttttggatgaaatgatactgggaggac

SEQ ID NO: 10215 - DNA, 369 bp, Triticum aestivum
  Clone ID: uC-tsrow189090h11b1
tcggtattgtgttcttgctaggctaggctagatctggggggggggaggctgggtcgttgttccgcttgaaatctctgggttttgctgcgctggaggttcttgctggccatggtttgtccaggcatgctgaggcgcaatctctgagctttatgaagatcgccactcacctgcgccggtgctgcttcctccagtccttctccgtcgtcttcctctactacttttatgtgatttcataattggccctctcaaatccgccgttgctagcagtaaactattttctttctcttcttcttcttcttctcgcttccttttcctgcttcaacaagtgataaataagaacggtagcagcatcatcatcatcagcagtag

SEQ ID NO: 10216 - DNA, 435 bp, Triticum aestivum
  Clone ID: uC-tsrow189091a01b1
ttccattgtcatggcaaaggtgaaaagcggataaaactagcaagtgggagatcgacgcaggtgaacaccaccacagctacaagtagaggaagtggaatttctcttgtggaaaaaagggagagttgcttgagtggccatgatgggaggtgggctgctcatggatcagggcatggcgttctccggcgtgcacaacttcgtggatctgctccagcagaacggcgccgacaagaacctcggcttcggctcccttatgccgcagacttcctccggcgaccagtgcgtcatgggcgagggcgacctcgtggaccccccgacggacaacttcccggacgccggggaggacgacagcgacgacgatgtggatgacatcgaggagctggagcgccgcatgtggcgcgaccgcatgaagctcaagcgcctcaaggagctgcagca

SEQ ID NO: 10217 - DNA, 446 bp, Triticum aestivum
  Clone ID: uC-tsrow189091a02b1
gtttggttcagttcatcaccaagaatgcaaccctgacaaatgagaaggaagttgatgcctgcccaatcagggcaatgaagttctctgtgtcccctgttgtgcgtgttgctgttcagtgcaaggtggcttctgatcttcctaagcttgttgagggtttgaagcgtctggccaagtctgatcctatggttctctgtaccattgaagagtctggtgagcatatcatcgctggagccggagagcttcatcttgaaatctgcttgaaggatctgcaggatgacttcatgggtggtgctgaaatcattgtttccccccctgtcgtctccttccgtgagactgttctggagaagtcctgccgtaccgttatgagcaagtcccccaacaagcataaccgtctgtacatggaagctcgcccattggaggagggattggctgaggctattgatgat

SEQ ID NO: 10218 - DNA, 447 bp, Triticum aestivum
  Clone ID: uC-tsrow189091a03b1
gaaacatttacggtgcaccctaaccctccatgtagtgatcatctaggcaagaatgatgcactatctgcactaggtggaaagttatgctatatccactctcccactccgtgggagattgccatttggttagcggaagatgggccaaatctgacttggtcactatgccgccgtgtcagtctgccgataccaagaaatcttcttgcctttgcatgtgcgtcaactgacccggacaagatattcctctccattgatgcgcgctaccttctcaggtgtgacctccataatgaatctcttgaagaaataatcaacatgcgtgacatgttgtatgatctccagaagggcagaaaattcaccattggttcactctttgttgcccactatatggtgccatttgtggaatcactgttgcgcatcagatcttcatagcaacaagccatcatatcgtat

SEQ ID NO: 10219 - DNA, 147 bp, Triticum aestivum
  Clone ID: uC-tsrow189091a04b1
taaacatttacggtgcaccctaaccctccatgtagtgatcatctaggcaagaatgatgcactatctgcactaggtggaaagttatgctatatccactctcccactccgtgggagattgccatttggttcgcagaagatgggccaaat

SEQ ID NO: 10220 - DNA, 354 bp, Triticum aestivum
  Clone ID: uC-tsrow189091a05b1
tccacgcgtccgcccacgcgtccggaaacgtaatgcactccaccaaaagtggcttcaagatcaagatgccgctgaaacaaataatttcattcaaagattaaaatatggtcatcaggagcagaaagtgttgatggaggaagacgaagatgatatcgaagactgtgaggatgaatcagaaaatgaaaggtcacatgacttgactcccaatattgtgcggcagaattctgagaaggcaaaacaaatgattgccaaaatgttcacagatgagaatgacacttatgagcactctgatgatgaggaaatagaggagcatttggcccgtcaacgtatttcaaagcgagaagttcatagtac

SEQ ID NO: 10221 - DNA, 456 bp, Triticum aestivum
  Clone ID: uC-tsrow189091a07b1
ggtggacatgagggtgttgagctatttgttgcatcgaacgaattcaaggagctgaatgtgggattggttcttgacgagggacttgcatcccctagggaggagtaccgggtgttctatgcagaacgtagtccttggtggcttactattaaagcaaagggagcgccagggcatggtgcaaaattgtatgatggtagtgcaatggagaatttaatgaaaagtgtggaggctcttcggaggttcaggacagctcagtttgatttggttaagtccggagagaaagctgaaggggacgttgtatcggtgaattttgcgtacttgaaggctgggacacctacacccacgggttttgtgatgaatctacaaccatctgaagcagaggtaggaattgacattcgaatccctcctagtgttcatactgaagcactagagaagcgtcttgctgaagaatgggcacct

SEQ ID NO: 10222 - DNA, 433 bp, Triticum aestivum
  Clone ID: uC-tsrow189091a09b1
tccacgcgtccgcggacgcgtgggcggacgcgtgggtttcgaaaaccgccgcgccaaccgccacccagccccgtccaagaaaccgcacgccaccgtggacgcgaccccccgccggcgccaagatggtgcggctaagcaacacggtgatcgggatcctgaacgcggtgaccttcctgctctcggtgcccatcctggcgggcggcatctggctgtgggcgcgcgccgacggcaccgagtgcgagcgctacctggcggcgccggtgatcgcggtgggggtgttcctcatgctcgtctccatcgcggggctcgtcggcgcctgctgccgcgtcacctgcctcctctggttctacctcgtcgccatgttcctgctcatcgtcgtcctcctcggcctcaccgtcttcgccttcgtcgtcacgcacaagggcaccgggga

SEQ ID NO: 10223 - DNA, 263 bp, Triticum aestivum
  Clone ID: uC-tsrow189091a10b1
tccatacgctcaaacactgctctacatgtgatcgctgtgttgagcaatttgatcatcactgcccttgggtttcaaattgcatcggaaagaagaacaaatgggagttctttatgtttcttatcctagaagtttctgcgatgatcattactgctgcaacggctgtcataagagtagcaggtgatccaggctctccagcatcgtttggtggatggcttaactattcagctacgaaccatccttgggtggtgtcttttgttataatg

SEQ ID NO: 10224 - DNA, 300 bp, Triticum aestivum
  Clone ID: uC-tsrow189091a11b1
gcgacgccgagaccgacgtagccgcagccaccaccgtccctgaacccctccgatgcgtccatgtcccctacgacatctacatgggcgggctcgagctgggcgtccctgcatcgagcggatcgacgccatcctcctcctcgagcaccaccgccttcttcttcaacttcgtcgtcgtcctatgctttgacccctccccgagcatgctcttgcacaactacaggtccgatgacggatcccaggagccagaagacgccactgatgactactagtacccggaggatgcctactactacgtgaaga

SEQ ID NO: 10225 - DNA, 408 bp, Triticum aestivum
  Clone ID: uC-tsrow189091b01b1
ttccagagtccagtccagtccaggcttggttgcacttgcagggagctcggcgaaatccggagcgtctcgcgtgtgtgcacctttgggaggcgaggacagccgccatggccgccaagagggtgctcctgctctgcggggactacatggaggactacgaggccatggtcccgttccagtcgctgcaggcgtacggcgtgaccgtcgacgccgtctgccccggcaagaaggccggcgacgcctgccccaccgccgtccacaagcccatcgggcaccagacatatgcagagtcgaaaggtcataactttgcacttaatgcttcattcgatgagattgacgctgctgggtatgatggattggtgattcctggaggccgtgcaccagagtaccttgcgatggatgaaaaagtgc

SEQ ID NO: 10226 - DNA, 379 bp, Triticum aestivum
  Clone ID: uC-tsrow189091b02b1
tgacagtttacttaagctagtacagtacaaccgttacaaaggcattggactgggttgggtgaaggaaatatgcaggtccattttggtaggtcttgattacttgcatggagagctagcaatcatccattcagatttgaaacttgaaaatgtactacttgtttcaacaattgatccctcaaaggatcccattcggtccggacttaaacctaatcttgagaagcctgaggggaatcctaatggagaagctggtcttaacccgattgataagaaactgaagatgagagcaaggagggtgctcgcaaagcttgctgagaaaagaaaatcagctgcagaatttgcacgctcagaaagaagcttggatggtattgacatgacatgc

SEQ ID NO: 10227 - DNA, 407 bp, Triticum aestivum
  Clone ID: uC-tsrow189091b03b1
tccacgtgtccgctcattccttcctaccacccccggcaccaccagcccaagcagagccatggcgcccagcggagacaacaccgtggccaacgtccacagcggcatcgacagcaccaacaagacgctgctcaagagcgacgccctctacacctacatcctcgacaccaccgtgttcccccgcgagcacgagtgcatgcgcgacctgcgcctcatcacggacaagcacccatggggctacatgcagtcgtcctcggacgaggcgcagctgctggggatgctgatcaagatggcgggcgccaagaagacgatcgaggtgggcgtgttcacgggctactcgctgctggccaccgcgctggcgctcccggaggacggcaaggtggtggccatcgacaccgaccgcgagtgct

SEQ ID NO: 10228 - DNA, 245 bp, Triticum aestivum
  Clone ID: uC-tsrow189091b04b1
tccacgtgtacgctcattccttcctaccacccccggcaccaccagcccaagcggagccatggtgccgagcggagacaacaccgcggccaacgcccatagcggcatctacagtaccaacaagacgctgctgaagagcgacgccctatacacatacatcctccacaccaccgcgttgccccgcgagcacgagtgcatgcgcgacctgcgcctcattacggacaagcacccatggggctacatgcagt

SEQ ID NO: 10229 - DNA, 360 bp, Triticum aestivum
  Clone ID: uC-tsrow189091b05b1
tgacgcttcgcctccggcccttcccatcatagggcacctgcacctcgtcggcgatctccctcacgtctccctccgcagcctctccaggactcatgccgctgacggcctcatgctcctccacctcggctccgtccccaacctcgtcgtgtcgtccccacgagccgcccaggcggtcatgcggacgaacgaccacctgttcgcgtcccgcccgccgtccaggatcgccgacgccctcctgtacggctggtcgtccgacatcgccttctccccctacggcgagcactggcgacaggcgaggaggctcgtcaccacgcacctcttcacagtcaaaaaggtccaagtcgttccgcatcgcccgtc

SEQ ID NO: 10230 - DNA, 367 bp, Triticum aestivum
  Clone ID: uC-tsrow189091b06b1
gccccttactgccatcccaccaacgccgacgcgctccggtccctagctagctcgctcgctcgccggtggtccccgcaaatcgtttcttgtttctggctagagcacaaccttttggttttgtccagcctcccgcttcgcattcccttgcgtgaggccatggccgaggtccctggagctgccggcgccctcggctccccgcccagggaggtcgtggacgccccagagcgcgcggctgctcttccctccgcggccggcgagctcggctccgccgacgatgctgataaggaggttcctggaggttcggaggtcagcggcgctcttggcaccgacaaggcagacggtctgtgttccggcgccgagctcgaat

SEQ ID NO: 10231 - DNA, 362 bp, Triticum aestivum
  Clone ID: uC-tsrow189091b07b1
ttccggcctccctcctcctcttgtcctccgcatgtaaccagctcggtcgatcgatcggctcggacgagaagcaacccgcttcaatccccgacccctgatcgtagtggagtgtggtatataggcggagctagcagaggacatggtgaagttctcgcgggagtacgaggccagcatcatccccgagtggaagggcgccttcgtcgactacaagtgcctcaagaagctcatcaagaagatcaaggtcgcacggcgcgacgccgagtccgaaggggactcctcgccggagagcgccgccctcgccgccggcgtcgagagcgcccgctatggcgccggcttctccgtgctcgaccccgtccgcgccc

SEQ ID NO: 10232 - DNA, 444 bp, Triticum aestivum
  Clone ID: uC-tsrow189091b08b1
tggctcttccccccagccagctctagtcccagacgccctctcctgctgcctgcctgctcctcctctgtcccggaatgcgcgatgccgggcactcgcggtaccgccggcgggccggcctgccgatgctctcccttctgctcgcgctcgcgctgttcgccgggggtgccagcgggcagccgccggtgccgccggagatgaggggcgtgcaggcgcagctcacggggctcaccaacgacgtcgcccacaccatctccgaccgcttcagcttctgcgtctccgacacgcaggaggactggaacggggccttcaactactcctccgacctcggcttcgtgcagcgctgcctcgccgacaccagaggtgacatgccgcagcgcttatgcacgccggcagaagcgaagttctacttcacaagcctgtacaacccgaaaggcgagaaaaacc

SEQ ID NO: 10233 - DNA, 433 bp, Triticum aestivum
  Clone ID: uC-tsrow189091b09b1
tttcgcttcgtgcctggtgccgtctcttctcccccctcgagccccttccagagccttcattcccggcctctctcccatcttcctccggcagctccggccgccggcagggagggggagaggggtggggccaaatactgtgtattttaggtcgcttgctttcttgtttattttgtaggttcctcgtatcgcaggagatggcaagctgcatccggtgcttgctggcagcaatagtccttgctacggtgctccaagggctggagctgaagttgagggctggatttgctgctgctgtttccaataagaagcttgccaagtccctgatctggagggcagccttctgttggctctctgctcgtcaaatcaccatggtggtggatggtgacagaggaggaagcagacgactgaagctatcagatcgggtccgagctcatag

SEQ ID NO: 10234 - DNA, 399 bp, Triticum aestivum
  Clone ID: uC-tsrow189091b10b1
cggacgcgtgggcggacgcgtgggcgtctacctccagatctccggagacccctccccactcccatccccgcgccgctgacccccgctcccattccccccacccggcggcgagtaagcagaggcggggctgctcgcagcgaaccctagccgccgcccgcccgcctccagccggcgccggcgcgacggtcggcgggagatctcgacgagggagatccagcagggccatggccagctccggcatcgcctaccccgaccgcttctacgccgccgcggcctacgccggcttcggcgccggcgccccttccaccgccgccatctcccgcttccagaaccgacgtcgccctcctcctctacggcctccaccagcaggcgacggtcgggccctgcaacgtgcccaag

SEQ ID NO: 10235 - DNA, 392 bp, Triticum aestivum
  Clone ID: uC-tsrow189091b11b1
cttgcttgcagagcccgaatggcgggacgggggcagggatggtgcggattctgccggtcttcccgcagtatcttagtgattcggtcgatgggttcgatggtgtccaggatggccttgaggatgatatgatcattccaatcgaggaggagtcgtcaacgatgaacagtcaccaagcatctcaattacctgcgttctcgggcgcgtattcctcggctcaggtgagggaggtgattgaggagagcgaattggaccaggacagctcagatagagatggtgccagcacgatttacgaggagaatgagagtgtgtccgttggggaggtgatgaagagcccagtattcagcgaggatgaaatgtcagaaggctctttctgggttgatctgggcaatagt

SEQ ID NO: 10236 - DNA, 232 bp, Triticum aestivum
  Clone ID: uC-tsrow189091b12b1
gtgagattgcagaagctttccttggcagcactgtgaagaatgctgttgtcactgtacctgcatacttcaatgactcgcagaggcaggctaccaaggatgctggtgtcattgctggcatcaatgtccttcgtatcatcaacgagccaacagctgctgccattgcttatggtcttgacaagaaggcttccagtgttggtgagaaagaatgtcctcatctttgatcttggagggg

SEQ ID NO: 10237 - DNA, 420 bp, Triticum aestivum
  Clone ID: uC-tsrow189091c01b1
ttcccctccgcagcctgcactgctcccccattgttttgtgtcctgagccatggctgccaagctgactcgcctccacagcctcagggagcgccttggtgccaccttctcctcccaccccaatgagctcattgcactcttttccaggtatgttcaccagggcaaaggcatgctccagcgccaccagctgctcgctgagtttgacgaactgttcgaatccgacaaggagaagtatgcaccctttgaagacatcctccgtgctgcacaggaagcaattgtgctacccccatgggttgcacttgccatcaggcccaggcctggtgtctgggactacattcgggtgaatgttagtgaactcgctgttgaagagctgactgtttctgagtacttggcattcaaggaacagcttgttgatgagcatgc

SEQ ID NO: 10238 - DNA, 475 bp, Triticum aestivum
  unsure (1)..(475): unsure at all n locations
  Clone ID: uC-tsrow189091c02b1
tccacgcgtccgagctcgctcgcatcagcaaggtggggattattttgcccagagagctccggggccatgaggccgatgcatctcttgggggtcacttgcctatggatcctctcatgcgccttgctgctcggcggcgcttgctccgatgggttgctgaggatcaacctgagcaagaagaggctggacaaggaaaccctagcagccgcaaaatcggcgaggcaggagaccaacctgctgaggcccgacgatggatctcgccactctctcggcctgtcagacgatgacatagttcctctggacaactacctagacacccagtacttcggagagatcggcgtcggcacgccgccgcagaacttcacggtcatatttgacaccgggagctcaaacttgtgggttccgtcgtcgaaatgctacttttcgatagcatgctacttgcaccacanatacaagtcgaccaaatcgaccacttaca

SEQ ID NO: 10239 - DNA, 482 bp, Triticum aestivum
  unsure (1)..(482): unsure at all n locations
  Clone ID: uC-tsrow189091c03b1
tacaattgtagtggcgtagcagcccgagcttgcggtcttgtgagccttgagcccacaaaggttgccgagatcctcaaggatcgcccctcttggtatcgtgactgtcggtgtgtggatgtgctccagattatccctacgggtaatggtggaactattgagcttatctacatgcagacttatgcaccgacaactttggcggcaccgcgtgacttctggattctccgctacactagcggtcttgaagactgcagtcttgtgatctgtgagagatcgttgactcaagccactggcggtccatcaggacctaacactccaaattttgtccgagccgaggtgctacctagtggctatttaatccgcccttgcgaggggggtggctccatgatccacattgtagatcatgttgatttggatgcttggagtgtgcctgaggtccttagaccactntatgagtctccaaagattcttgcgcagaagatgac

SEQ ID NO: 10240 - DNA, 470 bp, Triticum aestivum
  Clone ID: uC-tsrow189091c04b1
ataccctcgccgtctcctctcccacgaagcgcagcccgtcgagatggcctccgaggcggcgaaggtggcggtgcccgagaaggtgatcctaaagaggaggagggaagaggtctgggccgccgagaagaagcagaaggttgccgccgagaagataaaggccgccgagaacaccaaggtcatctacgcccgcgcggagcagtacgccggggagtatgaggcccaggacaaggagctggtgcaacttaagcgtgaggcccggatgaagggtgggttctatgtcagtcctgaggcaaagctgctgtttgtcgtccgtatccgtggtatcaatgcaatgcacccaaagaccaagaagatcttgcagcttttgcgtttgaggcagatttttaatggtgtgttccttaaggtcaacaaggccaccattaacatgctgcgtcgggttgagccatatgttgcctacgggtaccctaacc

SEQ ID NO: 10241 - DNA, 383 bp, Triticum aestivum
  Clone ID: uC-tsrow189091c06b1
ccacgcgtccgagtcccgtcgcggaacccaacgcgcgcgcaccctctctccccccgaatggagcggcagcctcggccgcagctggccgtggcggaggaggccatcgcgctctacgacacctactggttccaccgcctcgtcctcaacgcctactcccctcccgcgccccagccgccgccgccggcgcctgagcgcgagcagccggagcaggcgccggcggaggagagcaagagcgagctgcggcgggccccgtccgggctgcagcggcaccgcaggacgcggagcgacgaggccaaggccgccgcgttccacggccagctggagccgctcaagatccccaacggccaccgcgcgaggctcgagaccatcctgtccgggaagga

SEQ ID NO: 10242 - DNA, 446 bp, Triticum aestivum
  Clone ID: uC-tsrow189091c07b1
tcacgcgtccgacgaatcattgatgatgacatgcccctggcccaatttgctgttgccttcaatggagcatcctggacagatcctgattctattgcattaatggttatgcaaactatgcttggttcgtggaacaagagtgctggaggagggaagcacatgggttcggagcttgtacagagagtagcaatcaatgaaatagctgagagtataatggcattcaatacaaactacaaggacactggcctgtttggtgtctatgctgtcgctaaggctgattgcttggatgatttggcttttgcaattatgcaagagatgagcaaattatcatacagggttaccgaagaggatgttattcgtgcacgcaatcagctgaaatcctccatccaactccaccttgatggctccactgctgttgttgaggatattggacgccagcaactcatcta

SEQ ID NO: 10243 - DNA, 454 bp, Triticum aestivum
  Clone ID: uC-tsrow189091c09b1
gtaggtgtccccgcggctcgctcctcccccacccccccgcccccgcccccgcacacgccaccccatggaggcgccgccggggccggagcccatggtgctggacgcgccgcccccgctcgccgccgccgtcgtcccggcccacgcggccaccgagaagacgaggacggaggggggcgaccctgtcaccggccacatcatctccacaaccatcggcgggaagaacggcgagccgaagaggacaattagctacatggctgagcgggtggtaggaactggttcatttgggattgtcttccaggctaagtgcttggagactggagagactgttgccatcaagaaggtgctgcaggatcgccgttacaagaaccgtgagctgcagcttatgcgctccatggaccatcccaatgtcgtctttctgaagcactgcttcttctcgaccacaagtagggatgag

SEQ ID NO: 10244 - DNA, 424 bp, Triticum aestivum
  Clone ID: uC-tsrow189091c10b1
tgaaatggggagcacctgccaccagctggctccgcttctaatccggcgatgaatggggctgtggtttatcactccaacgagccgctgccagcgttcaaggacgtgccggtctcggagaagcagaatctgtttgtcagaaaggccaccctgtgctgtgctgtgtacgactttgccgatccgaccaagaacctgaaggagaaggaaatgaagcggcagacgcttatggagcttgttgattatgtcacttctgcaaatggaaagttctcggaaatcatcatgttagagatcagcaagatggttgcaattaacttgttccggagctcgaatcccactcctcgtgagaacaaggccatcgaaggagttgatatggaggaagaagagcctctcatggatccagcatggtcacacctgcagatcgtttatg

SEQ ID NO: 10245 - DNA, 322 bp, Triticum aestivum
  Clone ID: uC-tsrow189091c11b1
tttccttggacgcgtgggcgacaacggaagcaataactcgagccacggcgacgccgccagcgatggaaaccacctaccaatcaaacttaacattcctcccgtggatgcgagcgaggattcgatggagagctccgaggagatggtgacgccgagggcggaggcggccgaggaggaggagaagaagggcgccacgtcggaggtgccggtggagcgcgccgtcgaggtcgctgatgagggcgccacgggggaggccggggaggaggtcatggttgacgctttaccgcctgaagctgctgaccgggagcaagagggtaaggtggat

SEQ ID NO: 10246 - DNA, 466 bp, Triticum aestivum
  Clone ID: uC-tsrow189091d01b1
acgcccactcgtccgctcctctttccctcccaagcaaatcctctgcgctccccacgcctccttcttcttcctctgccgcttgccgtgtttgattcgggaccgaaatggcattccacgacgaggcgccgctgctgctcaggatcaacaccgccagaggcggccacatgggcggaggcgagtgcgacgaggccgagaaccagcggtggccgccgtggctcaagccgctgctggcgaccagcttcttcgggcaatgcaagatgcacgcggacgcccacaagtgcgagtgcaacatgtactgcctcgactgcatcaacggcgccctctgctcccagtgcctcgcctaccaccacggccaccacgccatccagataaggaggtcctcctaccacgacgtgatccgcgtgtcggagatccagaaggtgctggacataaccggcgtgcagacctacatcatcaacagcgcgcg

SEQ ID NO: 10247 - DNA, 492 bp, Triticum aestivum
  Clone ID: uC-tsrow189091d03b1
ttaccttcgccgtctcctctcccacgaagcgcagcccgtcgagatggcctccgaggcggcgaaggtggcggtgcccgagaaggtgatcctaaagaggaggagggaagaggtctgggccgccgagaagaagcagaaggttgccgccgagaagataaaggccgtcgagaacaccaaggtcatctacgcccgcgcggagcagtacgccggggagtatgaggcccaggacaaggagctggtgcaacttaagcgtgaggcccggatgaagggtgggttctatgtcagtcctgaggcaaagctgctgtttgtcgtccgtatccgtggtatcaatgcaatgcacccaaagaccaagaagatcttgcagcttttgcgtttgaggcagatttttaatggtgtgttccttaaggtcaacaaggccaccattaacatgctgcgtcgggttgagccatatgttgcctacgggtaccctaacctcaagagtgtcagggagctgat

SEQ ID NO: 10248 - DNA, 440 bp, Triticum aestivum
  Clone ID: uC-tsrow189091d04b1
ctcattgaatttttttcctccggtctcaccgagaaacctccgatccaagcgaagccaaggttctctcctcctcctcctcctcaagatgcagatctttgtgaagaccctcactggtaagaccatcaccctcgaggtcgagtcttatgacacgatcgataatgttaaggccaagatccaggataaggagggcatccccccggaccaacagcgtctcatcttcgctggcaagcagctcgaggatggccgcaccttggcgactacaacattcagaaggagtccaccctccacctggtgctcaggctccgtggtggcatgcagatttttgtcaagacactgaccggcaagaccatcaccctggaggtcgagtcctctgacaccatagacaacgtcaaggcaaagatccaggacaaggagggcatgcccccggaccagcagcgtct

SEQ ID NO: 10249 - DNA, 453 bp, Triticum aestivum
  Clone ID: uC-tsrow189091d05b1
cctggataaggaaacaagtgctaatgtctcgtataagcaagctgcgatttctgatattggtgtctatcatggtccatcagttgggactaaccaggacataagcaacagtgaagcaaacttgctagaagcaaatgctgctgacggtggaaagagctctcctgcaacttcaacgttgacatcttttgcacatcgtgatgggtctctgcctgcagaaccaaaggtccatgcagctcgaaccgaccaaatttggtcaattactaagctgtccgtaaaaacatcgtcagtggatggaaatggtggcaattcatcctgcatggctgatgcttgcaatgaaattagttcctgcaatgcttcacccatggaatatagtggcaattctgattctgattctgaaatcttccgagtcaagcgcagatccagcatattaggaagacctgctcctgacacagagac

SEQ ID NO: 10250 - DNA, 470 bp, Triticum aestivum
  Clone ID: uC-tsrow189091d06b1
tctggataaggaaacaagtgctaatgtctcgtataagcaagctgcgatttctgatattggtgtctatcatggtccatcagttgggactaaccaggacataagcaacagtgaagcaaacttgctagaagcaaatgctgctgacggtggaaagagctctcctgcaacttcaacgttgacatcttttgcacatcgtgatgggtctctgcctgcagaaccaaaggtccatgcagctcgaaccgaccaaatttggtcaattactaagctgtccgtaaaaacatcgtcagtggatggaaatggtggcaattcatcctgcatggctgatgcttgcaatgaaattagttcctgcaatgcttcacccatggaatatagtggcaattctgattctgattctgaaatcttccgagtcaagcgcagatccagcatattaggaagacctgctcctgacacagagacaacaaacttctctgaac

SEQ ID NO: 10251 - DNA, 256 bp, Triticum aestivum
  unsure (1)..(256): unsure at all n locations
  Clone ID: uC-tsrow189091d07b1
ttggacgcgtgggatcagctagctgatgggggtgcttcactggcgtgagaaggccacagaccggggataaaatttgtcatatagtttgtagtttgtgttttgttctcgagtttttctcttcattctcgtctccggttctgcaacagtgtaaattaccaaagtggttccgtcgctgtctttacaatgactgattaagctagcattgcggaaacataatgtatggaataaatcatcttattgagcatgttcttgcnct

SEQ ID NO: 10252 - DNA, 278 bp, Triticum aestivum
  Clone ID: uC-tsrow189091d08b1
cggacgcgtgggatcagctagctgatgggggtgcttcactggcgtgagaaggccacagaccggggataaaatttgtcatatagtttgtagtttgtgttttgttctcgagtttttctcttcattctcgtctccggttctgcaacagtgtaaattaccaaagtggttccgtcgctgtctttacaatgactgattaagctagcattgcggaaacataatgtatggaataaatcatcttattgagcatgttcttgcactcaaccatacatatagaagaaact

SEQ ID NO: 10253 - DNA, 524 bp, Triticum aestivum
  Clone ID: uC-tsrow189091d09b1
gaaatggggagcacctgccaccagctggctccgcttctaatccggcgatgaatggggctgtggtttatcactccaacgagccgctgccagcgttcaaggacgtgccggtctcggagaagcagaatctgtttgtcagaaaggccaccctgtgctgtgctgtgtacgactttgccgatccgaccaagaacctgaaggagaaggaaatgaagcggcagacgcttatggagcttgttgattatgtcacttctgcaaatggaaagttctcggaaatcatcatgttagagatcagcaagatggttgcaattaacttgttccggagctcgaatcccactcctcgtgagaacaaggccatcgaaggagttgatatggaggaagaagagcctctcatggatccagcatggtcacacctgcagatcgtttatgaggttttcttgagatttgtagcgtcgcaggagacagatgcatagctggccaagaggtacatagaccattccttcattctcaagctactagatctttttgac

SEQ ID NO: 10254 - DNA, 490 bp, Triticum aestivum
  Clone ID: uC-tsrow189091d10b1
cgggaagagaggggcggccaccccgggggaccgaaccctatcggccgcggccccccctccatcgaccgccagtcgccgccggccatggcaggggcggcgccggatcgggcggcgctgacggtcggcccgggcatggacatgccgatcatgcacgacagcgaccgctacgagctggtgcgggacatcggctccggcaacttcggcgtcgcccgcctcatgcgcgaccgccgcaccatggagctcgtcgccgtcaagtacatcgagcgcggggagaagatagacgagaatgtccagcgtgagataattaaccatagatcactgaaacatcccaacatcattaggtttaaggaggttattttaacaccgacccatcttgccattgtcatggaatatgcatctggtggtgagctttttgagagaatatgtaaaaatatacgattcagtgaagatgaggctcgctacttcttccagcagcttatatctggagtca

SEQ ID NO: 10255 - DNA, 455 bp, Triticum aestivum
  Clone ID: uC-tsrow189091d11b1
gctttgcgctgaaagttcatcagcaactatgaagggcaccaagctcgcggcgatcctgatcctccaggccgtcctggtcatgggagtcctctcgcacgtcaacgccgacttcttccccaagtgctgcaacaactgcaggtccttctcgggggtcgacgtctgcgacgacgcccaccccaagtgtcccaagggctgctcggcgtgccgcgtggtgtcgacgagccccgaaatgtggcgctgcgcggatatgaaatccaccgtcgacggcacctgcggtggaccctgcaagaagtactgatcggttcatgccggcatatgatatgttccgcctaaggccccgcttggatcgtcggtttgctcctaaatacacttgtaaccaaaacagacctcgagccgtcgttttcaatctaggcggaaataacactgcgaccggtaaaatacacttgtagattaaa

SEQ ID NO: 10256 - DNA, 404 bp, Triticum aestivum
  Clone ID: uC-tsrow189091d12b1
caccatccatgatgtcgtgcttgttggtggttccaccagaatccccagagttcagcagctgttgcaggacttcttcaacgggaaggagctctgcaagagcatcaaccctgatgaagccgttgcctacggtgctgccgtccaggctgcaatcctcagtggtgaggggaacgagaaggtgcaggaccttctcctccttgatgtcaccccactgtctcttggtcttgagactgctggaggagtcatgactgtgctcatcacccggaacaccaccatccccaccaagaaggagcaggtcttctccacctactccgacaaccagcctggtgtgctcatccaggtttttgagggtgagaggacaaggaccagggacaacaacctgcttggcaagtttgagctctccggca

SEQ ID NO: 10257 - DNA, 474 bp, Triticum aestivum
  Clone ID: uC-tsrow189091e01b1
cacaaagcttgctaacccaaacaaggtggagtatgatcggcatggatgcctgaagagagtgaataggttggcccgctaccactctctctcctccgtcaacagatcatgatgctccggtacaagtacccacatactaagatcattgtcgtggagtactacaaacccttccttgcatttttagatatgccagaacattttggactgaatagcagcacaaccctcctcacctgttgtggtgcaggaggccctccttataactacgacttcaacgcagggtgcggcctgccgagtgtgacagcatgcgcaaatccataccaagcgcttcagtgggatggtttccaccttacggagtccgcctacaggaccgttgccgatggttggctccatggcccctacgccgatccaccaataatgcacgttgcacgctagtacacccgtagtttgtttcttactggcctaaaacgccatatgtac

SEQ ID NO: 10258 - DNA, 288 bp, Triticum aestivum
  Clone ID: uC-tsrow189091e02b1
tgaactctagctaccccgcccccacctcgacgcatgccctctctcccccactatcttcgccgtcgccgccacctccccctccggcctccgtccgcgagggaggccccgtccctccccgctccgcgctccagtatttcttgccgggagcagcgacggtatgccggcggcccaatcgagcgggagagaggggatcaggacagcgggcgggggaggaagagcgaggtcctcgagcggagcactgcagagggcgaggaggagcaggatggtttcgctgtcgacgtggttccg

SEQ ID NO: 10259 - DNA, 493 bp, Triticum aestivum
  Clone ID: uC-tsrow189091e03b1
acggttacctctctgctgccaacccgacccaaggttgttcgtcgccagcatgggtctggcgaaggatggcgccgagatggaggaggggacattggagattggcatagagtataggactgtctccggtgtggcagggccgttggttattttggacaaagtaaagggcccaaagtatcaggagattgtgaacatccgattgggagatggcaccactcgtcgtggtcaagtcctcgaagtcgatggtgaaaaagctgttgtgcaggtatttgaaggtacttcagggatagacaacaagtatactactgtgcagttcacaggcgaggttttgaaaactcccgtctcacttgatatgcttggacgcatttttaatggctctggaaaacctattgataatggcccccctatattgcccgaggcttacttggatatttctggaagttctatcaacccaagtgagagaacctatccagaagagatgattcaaacaggaata

SEQ ID NO: 10260 - DNA, 415 bp, Triticum aestivum
  Clone ID: uC-tsrow189091e04b1
ccattccccccggtctctcttctcttccggtctgcctctctgtccagcgtgccgggatcgatccgagcttcggttggggtgggttcgccgattgatgcctgtgaggcaatggcggtctcctcgccttcttcagctccggagaagaagaggaaatggctccaaagcaacaggaaggtgatcgacaggtaccttcgggaggcgcgggcgattctcgcgacggcgccggataccggcggcggggacgctgtggcggcgctcggtctcatcgacgccgcgctggagctttcgccgcggatggaggccgcgctggagctgcgggcgcgggcgctcctcgcgctgcggcggtaccgcgaggtcgcggagatgctccgtgactacatccccagctgcggaaaatcctgctccggcgaggatg

SEQ ID NO: 10261 - DNA, 272 bp, Triticum aestivum
  Clone ID: uC-tsrow189091e05b1
cccaggtcccaaccaccaccggaccgtcgctccgtcgtccagatctcgcccgcgcgcgcgatggccgtcggcgaccccatgccggtcgcggagcccgcggacggcgacgagatcgtctacgagtacatgccctgcatccgtatctacaaggaccgagtggagcgctacttcggctccgagttcgtatacgcctgcggcgacaccgactccggcaccggggttgcctaccgtgaccgagtgatctcccccgaggtctatgcgcgcctatacct

SEQ ID NO: 10262 - DNA, 471 bp, Triticum aestivum
  Clone ID: uC-tsrow189091e06b1
acggtcaataccttccgctcgttggagccgcgtgccatggacaccatcctggccggactctgtgcacgcatccggccttcggacgcccgcggtctactgtgtggggccactgatcaagtcggaggatgtgggcgtgaagcgcggtgacgagtgccttgcgtggttggacacgcagtctaagggcagcgtggacttcctctccttcggcagccttggccggttcagtgccaaacaaacaaggaaggtggccgccgggttggaagccagtggacagaggttcctgtgggtggtgcggagcccgccaagcgccgactcgtcgaagaactgcgagaagccgccagagccggacttggatgcccttctccacagggattccttgagcggacccagggcaggggcctcgtagtgatagtcatgggcgccacaacgcgacgtgttggcccatgatgcggtgggctgttttgtgacaca

SEQ ID NO: 10263 - DNA, 437 bp, Triticum aestivum
  Clone ID: uC-tsrow189091e07b1
gtgatgaagaagattccgatgatgaagaagaggaggaaattggtgagatgccttcacctgaaagacgcattcaaggggttgaaccaggggaagaggctgagctagcaagggtgaccgaagaagcgagggaggcttgcaagtcaaaacgatcagctggaccacttccagatgaggcagatcacccatctcagtttattcgtgacatagctcgcgatgtgcgctcaaagaggaagatggtcaaggtttcaagtcttgtgaggaggaatagggtgaagaaaggtaagttggttgttctggatgaagagggggaagcttcggaaagtgaagatgatcaggaagaagacaaagaaagtggtgatgaagaagattttgatgatgaagaggaggaggaaataggtggggtgccttcacatgaaagacgcactcaagcggttgaa

SEQ ID NO: 10264 - DNA, 455 bp, Triticum aestivum
  Clone ID: uC-tsrow189091e08b1
tccacgcgtccgctgagctcctcatcagcgtgcgacgaatctctgcccgatcgaatctccagggtgataacagggatggctaccggtagtgatgctggaaagtccgctgaggcagtgttggagtggcctaagcaggacaaaaagaggatgctgcatgctgtttaccgtgtgggagatctcgaccgcacaattaagtgttacacagaatgctttgggatgaagctgctgaggaaaagagatgtccccgaagagaagtacaccaatgcctttcttggatatggacctgaggatactaattttgcacttgagctgacttacaattatggtgttgacaagtacgacattggagcgggctttggacattttgccatcgcaaatgaggatgtgtacaagctgtctgagacaattaaatcatctgattgttgtaagatcactcgtgaacctggtcctgtcaa

SEQ ID NO: 10265 - DNA, 422 bp, Triticum aestivum
  Clone ID: uC-tsrow189091e09b1
tatgcatcgcaaactggcaacgccatggactctgccgaacgtgtagggcgagaggctgagcgttgaggctgcctggctgtcgatgttctctccatggattgcttcgatcccagttgcctgccacgcgaaaggtatgtggtcttcgttgtgtccaccatggggcagggggaccccccagattccatgaaggatttttggacataccttaccagaaagtctctgggtgcgcgatggctggaagggctattttatgccgtgtttgggctcggcgattcaacctatgggaagtacaattatcctgcaaagaagctcgatcgaaggcttttcaatcttggtgcaaaaagaatcacagaaaaaggcttgggagatgatcaacattcatctggatacgaaggagctctagatccgtggttgctgatttt

SEQ ID NO: 10266 - DNA, 417 bp, Triticum aestivum
  Clone ID: uC-tsrow189091e10b1
cgcctcagctcacgcatctctccctcagctccggcaagcaacaccagctctcctctcccctcgcttccctgctgcaatgtcgaccgacgtggccgccgatgtcccggcccctgaggtggaggtgaccgccgaccccgtcgtggagaccacggccgaggccgccgccggcgacgcgaagccggccaaggagaccaaggccaaggcggccaaggccaagaagctcctccgccccgaggaagccccgcgctacccccgcccacccgacctacgccgagatggtttcggaggccatcaccgccctgaaggagcggacggggtcgagccagtacgccatcgccgagttcgtcgaggacaagcacaaggcgcacctccccggcaacttacgcaagatcctgtcggtgcagctcaagaagctgg

SEQ ID NO: 10267 - DNA, 492 bp, Triticum aestivum
  Clone ID: uC-tsrow189091e11b1
cccacgcgtccgcggacgcgtgggcacacgggggtggtctattgtccgtcgactctctgcttgggttgcaagaagcgcggggaagacgccggagatgggttcttgcgcgtcggtccacaaggacgacgtcgggctgcccaagaagcagcagctgctcgcctcctcgccgccgcccaaggacggcaaggccgtcgacggcgcccccgtcggcgacgtcctcgtcgacctcaagcgcaagatcgagggcttcggccccagcaggacccctgacaccggtagcaaggatgagatgttcttcgagtctcaaccgtggttagattccgactgcgaggacgacttctacagtataaatggagatttcactccgtcgcgcggcagcactccggtccatcaacccagggcgcagaccgtgatgagcagcgtatttctacctgacaacgccgtgcagagtcccaattcatcggaggcttctccaactggacggagaaaata

SEQ ID NO: 10268 - DNA, 436 bp, Triticum aestivum
  Clone ID: uC-tsrow189091f03b1
gtggatttccagaaatccgcctagctctgaatgaggatttaggcattggaaagaatagctcttctacacatgattacagaagttcttctggaggaggatcagttgttcttgatgattgtaacttccatgagtcagtgcagcttgacagttttgacattgacagaactctgcatttaataccacctgatggagaatttccagtgatgaactaccggatgactcaagaatttaagccgcccttccgtgtcaccgcactaattgaagaagctggtccatctcgggctgaagttctattgaaaatacgggcagactttcctgcgaatgtgactgccaacacaatcacagtacaaatgccagtgccctcttacacaatgagggcaagttttgaactggaagctggagcagttggacagacaacggattttaaagaaggaac

SEQ ID NO: 10269 - DNA, 370 bp, Triticum aestivum
  Clone ID: uC-tsrow189091f04b1
ttcggtttgtgacagagaagtgggtagatgggtgggatgatcctcgtttgatgactttggctggactgaggcgaccaggagtatcagcaactgcgagcaattcatttatccgtggaattgggataacgagaagtgataatagcttaattcgtgttgaccgtcttgaatatcatatcatagaagaactgaataaaacagcttcttgaaccatggtggttttgcatgctttaaaggttgtaataactaacttggaagatggaaaagacatagaccttgatggaaaaaagtggcctgatgctcctgctgatgaagcttctgcctactacaaggttcctttctcaaaaaccgtctacattgaaaaaactgattt

SEQ ID NO: 10270 - DNA, 460 bp, Triticum aestivum
  Clone ID: uC-tsrow189091f05b1
gcaggcatggcttgctgcggcaaaatacccaccgccgccgcccccgtcgtttgagctgccggagtccgaggtgagggagaggttctccaagtgggtgatcaagtactcaaagcactactcgtgccatgaggaggaggagatgcggttccaagtcttcaagaacaacaccaacgccatcggccaattcgaccaacagaatcctggcaccgtcgtcggtcgcgggttccgaccaactgggtttcaggtccgtggctcgggcggggtccgtatgaacaggttcggcgacctcagccccagggaggtcatccagcagttcaccgggctcaacaccaccagcttcaatgccacgtcacccacctacctaccctaccactccttcaagccctgctgcgttgactggcgctccagcggcgctgtcaccggcgtcaagaatcaaggcacttgtggatcatgctgggca

SEQ ID NO: 10271 - DNA, 255 bp, Triticum aestivum
  Clone ID: uC-tsrow189091f06b1
ttacgttttcggtttagtaatataatgcttattgcattacttgtggcccaatatgcattgctagggtcaggactactgcaaaaatatgtgttttcaattatgttgcaatgctcacttgttgtgtgtatggccgcattcataagaggcgtgatcaagcattataagctcacaacatatgtattcatatttcaccgcatgattggaaatatatggaataagcagtttttatccaactaaaaaaaaagtacaatagat

SEQ ID NO: 10272 - DNA, 410 bp, Triticum aestivum
  Clone ID: uC-tsrow189091f07b1
tcacgcgttcggccacgcgttcggcgaggtcttcttcctcccttcctccccctagcaaaaggctgggcctcaactcctcatagcccagccatggagtttcttccttgtgaagatggagtccatcttcatcatgccacaaggcaaacttggtccttgctccacatgagaacaagagcctttggtcggtcctccacctcagaacagaagaaaggtgctaattgtttcttccgcacaatatagaagccagtcgtgcgactggcttctatcttggtcgagagaagtaaaattaggttggtccaggccttcaatcaatcctcaagtatataatggtcagtatttgatgtcgatttggttttatattgcatcaaaaggtaaaggcttctcctggatttcggtctgggtggttttgg

SEQ ID NO: 10273 - DNA, 350 bp, Triticum aestivum
  Clone ID: uC-tsrow189091f08b1
tacaaatcaagctcccagctcccagctcagctagttgactacctgcaaatttggtgacaaggttgctaggtggatgaacagtcactcgaccatggtggtaccgtcggtgttcgccgccttctacaaggacggcgaccgcaaggtgtccgtgtccgagctgcgctgctgcatggcggcgtccttgggcgaggacatatccgaggaggaggcggccgtggtcctcgcggcggcggatgccgacggtgacgggctgctaaaccaagaagagttctcgaggctagccgccggtgcccatgaagaggacgacgtgaggcgaagatgcctgagggaggcgttcgggatgtacgcgt

SEQ ID NO: 10274 - DNA, 342 bp, Triticum aestivum
  Clone ID: uC-tsrow189091f09b1
accgactgctcgcacccctcgcatgaagacagactgggacgagtcggtgatccagtctccgtggtatggttcaaacaggccttgcgtggtgaactccaccccgccaagccctgggcgtgaaatggttcctgacccggtatggctggccggcatccagatctcgtcaacgagcccttcatcggccacattgagtctgatgtcctccaacccattcagcgtgttcaaagaagccatccttggcggcggttcatcaaggatgtgcacgcccgggcagagcggcacgtgctcgccggtgatccctggcatggcgcggcacccggacgttcacatgatggacgtggt

SEQ ID NO: 10275 - DNA, 440 bp, Triticum aestivum
  Clone ID: uC-tsrow189091f10b1
tcaaaaccaagagacaaacctctcctcctcctccttcttcctcctcctcatcctcttgggtggatctcatcttcagatcacatccaagcagcgcaagcaagagaggagacgcgctccaccgtcggcaaccaaaccaggcaaagggcggcgatgacgttcgacaaggtggaggagctccggccgggcacctacggccacaacctccagctccgggtgctcagcgccaagcccgtcgtcctccacaggccgcagggcggcagggccggcggcaacatgcgcatcgccgagtgcatcgtcggcgacgacaccggcgtagtcgtcttcaccgcacgcaacgagcaagtggacatcatgaagcccggggcagtcgtggaggcgaggaaggcgagggtggacatgtacaaggggtcgatgcgcctggcggtggacatgtgggggac

SEQ ID NO: 10276 - DNA, 439 bp, Triticum aestivum
  Clone ID: uC-tsrow189091f11b1
tcttgctcaatgcaagaaggccatcccttcgcgggaagagggagggaaagtgattgtgatcgacatagttgtagactcttcttcgggaccaacgcacgaagcagagctcctgatggatgtagccatgatggtgatgaccaatggccggcagcgagatgaaactgactggagcgagatattcaccaaggcaggattcagtgactacaaacttgtgaagaaactgggagctcgaggtgtctttgaggtctacccgtgagacaggcccaaaaatacgtattataatttgtggtttggttcagaagatgtgctctatggggactgtcttactttgtcaggtacgtttcaaggaggatacaaggtactagcgagcatatggagtgctatgcatatgggtgtcatgcattcttggtaactttccgatcggtaaaattttcattcg

SEQ ID NO: 10277 - DNA, 335 bp, Triticum aestivum
  Clone ID: uC-tsrow189091f12b1
actccgcactcgtggtggagtggagagcgtggctggcggcgggcctgcctcttcctcttcctcttcctagcggcactagtaggagtagccggtaaacccgcacctaaaccgcagtctcccatcgccacaccccgcggctcggcacgggcacggcacagatctccccactccaccccgccgggtagcgcgcggcggccgaagcacgcgagcgagcgagccctttccggccgcctacgcctcgggggcggacgcgcgcggatcgcgtcatggcggaggcgggcaagcgggtcgacctggccgcgccgctgcgctcggcgcgcctgccctaccacaag

SEQ ID NO: 10278 - DNA, 380 bp, Triticum aestivum
  Clone ID: uC-tsrow189091g01b1
accgctttcgtggccgtcgtcagcccgacccagctcgtcgtggccaacgccggcgactcccgtgccgtcctttcccgcgctggcgtgcctgttgcactctccgtcgaccacaagcctgaccggccggacgagctggagcgcatccaggcggcgggcgggcgcgtcatctactgggacggtgcccgggtgctcggcgtcctcgccatgtcccgagccataggggatggctacctgaagccgttcgtgacggctgagccggaggtgaccgtgacggagcgcagcgacgccgacgagtgcctgatcctggccagcgacgggctgtgggacgtggtgaccaacgagatggcgtgcgacgtcgccagggcgtgctttcggagcaa

SEQ ID NO: 10279 - DNA, 402 bp, Triticum aestivum
  Clone ID: uC-tsrow189091g02b1
gagctgtagagtctgtagatgacaaatttgaagtattctacattgattttggcaaccaagaagtggttccttacaaccgcatccggcctgcagacccatcagtatcctcctctcctcctcttgctcagctctgcagccttgccttcataaaggtgcctggtctggaggatgataatggtcaggaagcagcagagtatctcagcgaatgcttgctgagcagttcaaaacaataccgggcaatgatcgaagagcgcgacactactggtggtaaagtgaagggacaaggcactggacctgtactcattgtgactcttgttgatccagagacagaatccagcatcaatgctgccatgctcgaggaagggcttgcccgacttgaaaggggcaagagatgggacacca

SEQ ID NO: 10280 - DNA, 393 bp, Triticum aestivum
  Clone ID: uC-tsrow189091g03b1
tgcatttccatccaccgccgccgcccgccgcattccgagaggttcgagctcgccggagagggaggagagatggccaggaagggcggagagaggaagaaagcggtgacccggtccaccaaggccggcctccagttccccgtcggccgcatcgggcgcttcctcaagaagggccgctacgcgcagcgcgtcggctccggcgcccccgtctacctcgccgccgtcctcgagtacctcgccgccgaggtgctggagctcgccggcaacgccgccaaggacaacaagaagacccgcatcgtgccgcgccacctgctcctcgccatccgcaacgaccaggagctcggcaagctgctcgccggcgtcaccatcgcgcacggcggcgtgatccccaacatc

SEQ ID NO: 10281 - DNA, 485 bp, Triticum aestivum
  Clone ID: uC-tsrow189091g04b1
atcaacaagctggaaggcaactacatctacgcttcgaggaccctgctgttcctgaaggccgacggcacgctgaagcccttggccatcgagctgagcctgccgcacccccaggggatgcagcacggcgcggagagcaaggtgtaccttccggctggtattgagtctggtgttgatggccagatctggcagcttgccaaggcttacgcctctgttgacgactccgcatggcatcagcttatcagccactggctgaacacgcacgcggtgatcgagccgttcgtgattgcgacgaaccggcaactcagtgtggtgcacccggtgcacaagctgctgagcccgcattaccgcgacacgttgaacattaatgccctggcgcgaaccactctcatcaacgccggtggcgtctttgagatgaccgtcttcccggagaaatatgcgcttgagatgtcttccatcgtctacaagaactggaagctcaccgagca

SEQ ID NO: 10282 - DNA, 453 bp, Triticum aestivum
  Clone ID: uC-tsrow189091g05b1
tgggaagaagaattctggctctgggaaggatgactccgatggcgactccgggaaggagcacaacggtggtttcactgctaacggtacggttgccaagggtggccaggagaatggtgctgttaaggacagttctcgcgccgcccgggctgttgttgttgacaatgatggcaaggagaacggggaccccaacgacggggccttcgatgtaaataccttgcgtaagaagacaggaggaaagaagggcggcggtggcggtaagaagaacgatgtgaagaaggcggccaagaccgagcccaagaaggttgtcaagcagatgagggtctgggatgacaaaccgccgaagaacgagaagctggacttcacggacccggctgacgagagaggggaggaggtgatagagaaaggtgcttaccaaccagggggacagcatgatggataaggatgaagatctga

SEQ ID NO: 10283 - DNA, 422 bp, Triticum aestivum
  Clone ID: uC-tsrow189091g06b1
tccacgcgtccgagttggtctaactatatttactttgctgaactccctttgtgatggttcttcttgaagtgaagaattgacgtctagactggcataattcagttcctggatgaaaaaatttacatgtccttttagtctgaaaatcatagtgggccttggagcatgatgcagaaaattgtaggtatgccctgcacttcccatacatgaaggcaaatgatttctttttggatgccactgtcgtccggcacatggtgtttatcaatgagtaaatggtacaaagttcgaattatcagtttacgttcgtcctgatggatcgatagcttcgtcgcggtcatcaggagaaatatcaccaatctagcggacggccaaaccgagcggtcgatacaggaaactagcccctgccattccccatctctgtattt

SEQ ID NO: 10284 - DNA, 386 bp, Triticum aestivum
  Clone ID: uC-tsrow189091g07b1
ttccacgcgtccgcggacgcgtgggctagccagcatttggtagtacacaagctacatacatatccccaagcagggctagctaaaccgatctagaggatgtcgttggtgaggttcttcgacacgctggccctggactcgtggaaccccttcggcagcatcttcggcaccacggcgtccagcggcaccgacgcctggctggccagcgacacgacggcgttcgccgacacctacatcgagagccgggagacggcggaggcctacgtgttcagcgccaggctccccgcgggcgtcaccaaggaggaggtcaaggtggaggtggaggaggagggcaaggtgctggtcatcgccggcgagcggaacctgcggagggaggccaagagcgagac

SEQ ID NO: 10285 - DNA, 357 bp, Triticum aestivum
  Clone ID: uC-tsrow189091g08b1
tttctccgtcgccttcctctactggttctacgacttctgatgaactcctcgcccctcgagaacgccgcatccatccagcctctagttgattagtagatccagcctcgtttcttccacgttcttgccttactccttcccgccatccaagaaaagagaatttccttttctggttcttggatcaagaacccgaccggccatgtcgtcgccgtcgcgccggagctccagccccgagagcaacatcgacggcggcagcggtagtggctccgacggtgacgagcgcaagctcaagaggatgctgtccaacaaggagtcggcgaggcggtcccgcgcgcgcaagcagcagcggatggaggagct

SEQ ID NO: 10286 - DNA, 436 bp, Triticum aestivum
  Clone ID: uC-tsrow189091g10b1
gcgctcgtggcgcacatccagggtctctccgggagcccggacgagctggcgcagctccacggcctcctcaagcaggccgacggcgacgccctgcgcgtccactccgccggcctcctgcccttcctctcccacctccaccccggcgcccactccctcggctacctctacctcctggattctttcgtgtcgtcgtctgctaatctgagggcgcacgccggcggggaccttcttgtgaccgtggccgatttcctcacctcttgctcggccgaccagatacgcatggcgcccgacaaatttgtgacatgtctgtagggtgctcaagaacgaggtcatgcagctcaatgcgccgatccgagggattgctccgcttcgggctgctgtccgcaagatccagacatcgtcagagcagcttaccccactccacgctgaatacctg

SEQ ID NO: 10287 - DNA, 467 bp, Triticum aestivum
  Clone ID: uC-tsrow189091g11b1
aaaagcgacgagacaaggaccaaacaccaaaatgctctcatccaccgctctccggccgctgtcgccggcgacggcgacgacgcccgcgtaccccgccaccgccacctcggccacgcccgggcggcgctcggtggcggtgcgcgtgctgcgggactacggctcgatccccaagcgggagcccttcagctccagccgcagcatcctcgacgagttcttcaagcaggagaagcctctcgtccagcgcaccaaggaccacatcacagattattgcacgacccttgaaggcgatgattgctgcagctgctgggatgcctattttgaactcaacaaactcgagcaagagctaccgcaagaagaaatctcaaggatggtgaaggactcgcggtcagacccaaggtacctcataagcagcatccaccaccggtcagacctacggaagaagatggccgagaaagctcacaattcag

SEQ ID NO: 10288 - DNA, 470 bp, Triticum aestivum
  Clone ID: uC-tsrow189091g12b1
acggcgggaggttcatccagtacaacatcttcggcaacgtcttcgaggtcaccgccaagtacaagccccccatcctccccatcggcaagggcgcctacggcatcgtctgctccgcgctcaactccgagacggggggcaggtggccatcaagaagatcgccaacgccttcgacaacaagatcgacgccaagcgcacgctgcgggagatcaagctgctccgccacatggaccacgagaatattgttgcaataagggatattatacctcctgcacaaaggactgcatttaatgatgtctatattgcatatgaattgatggacaccgacctgcatcaaattattcgctcaaatcaagctttatcggaggagcactgccagtatttcctttatcagatccttcgtggcttgaagtatatacattcagcaaatgttctccaccgagacttgaagcctagcaatcttcttttgaatg

SEQ ID NO: 10289 - DNA, 360 bp, Triticum aestivum
  Clone ID: uC-tsrow189091h01b1
caagggcattgttgattcagaggaccttcccctgaacatctcccgtgagactctccaacagaacaagatcctcaaggtcatcaggaagaaccttgtcaagaagtgcattgagctcttctttgagattgctgagaacaaggaggactacaacaagttctacgaggccttctccaagaacctcaagcttggcatccacgaggactcccagaacaggaccaagattgctgagcttctgaggtaccactccaccaagagtggtgatgagctgacgagcctcaaggactatgtgaccaggatgaaggagggacagaacgagatctactacatcactggtgagagcaagaaggctgtggagaactc

SEQ ID NO: 10290 - DNA, 311 bp, Triticum aestivum
  Clone ID: uC-tsrow189091h03b1
cgatcatgtcgtcgccatcgcgccggagctccagccccgagagcaacatcgccggcggcagcggcagcggctccgccggtgacgagcgcaagcgcaagaggatgctgtccaacagggagtcggcgaggcggtcccgcgcgcgcaagcagcagcggatggaggagctcatcaccgaggccagccgcctccaggccgagaacgcgcgcgtggaggcccagatcggcgcctacacgaccgagctgaccaaggtggacggcgagaacgccgtgctccgcgcgcgccacggcgagctcgccgggcggctgcaggcg

SEQ ID NO: 10291 - DNA, 442 bp, Triticum aestivum
  Clone ID: uC-tsrow189091h04b1
ttcactcgtccgtgtggttcttggcattgctggcttgcatagcagtaacaacgctgatcaccattcatatggtgcacatcctgcacaaacacagccgaaagagagtttcttctgctcatccgcccggccctgccggccaccccatcctcggcaacttgctctatgtcatcggcccgctccgcaacaacccacacaccacactcgcctacctcgctcaaacctatggacccatcttgtccctccgccttggtctgacccgcaccatcgtcgtggtgtcatccgccgctgcggctcacgaggcccttgccaagaatgacacagcgctcgcgtcccggcttgtgccagacaccgtccgcgccatgtcgtatggcacgacgtccatggtcttgccttcaagctccaacccactgtggaagcaggaccgtgccatcatgggcgccca

SEQ ID NO: 10292 - DNA, 320 bp, Triticum aestivum
  Clone ID: uC-tsrow189091h05b1
tccacgcgtacgagttgggctaactatatttactttgctgaactccctttgtgatggttcttcttgaagtgaataattgacctctagactggcataattcagtttctggatgaaaaaatttacatgtccttttagtatgaaaatcatagtgggccttggagcatgatgcagaaaattgtcggtctgccctgcacttcccatacatgaaggcaaatgatttctttttggatgccactgacgaccggcacatggggtttatcaatgagtaaatggtacaaagttcgaattatcagttcacgttcggtctgatggatcgatag

SEQ ID NO: 10293 - DNA, 491 bp, Triticum aestivum
  Clone ID: uC-tsrow189091h06b1
tgaagatgtaacttcgtcagaaagtgtgcgcttgaataggaaatgtgacagaaaaataacgctgtatggttaccttcgtggatgtaacatgaaaagagggaccaaggtgcatatcacaggagcaggtgatttcagcttgtctggtgtgacaagtttggctgatccctgccctttgccatcggctgcaaagaagcgaggactacgtgacaaggagaagctgttctatgccccaatgtctggtcttggggatctcctgtatgacaaggatgcggtgtacatcaacatcaatgatcatcttgttcagttttcaaacactgatgacaacaatgcatctaagaaacaagggaaaggtaatgatgtcggtgtggctctagtaaaaactcttcagaacaccaaatactcccttgatgagaagttagatcagagttttataaatttcttcggcagacggcctgctgctcagtccgaagacagtgacatgacaggcaatg

SEQ ID NO: 10294 - DNA, 371 bp, Triticum aestivum
  Clone ID: uC-tsrow189091h07b1
ttcatcaacatggacgctgatgtgatcaccatcgagaactcgcggtccgacgagaagcttctgtccgtcttccgcgagggtgtggtgtacggtgctggcattggcccgggtgtgtacgacatccactcccccaggatcccgtccaaggaggagattgccgaccgtgtcaacaagatgctcgcggtcctggacaccaacatcctgtgggtgaaccctgactgcggtctcaagacccgcaagtacgccgaggtcaagcctgccctcaccaacatggttgaggccgccaagcagatccgtgccgagctcgccaaggcgcagtaagccgtgctcgtatagcagagccccccttttaattgcaaggaggatgtcac

SEQ ID NO: 10295 - DNA, 374 bp, Triticum aestivum
  Clone ID: uC-tsrow189091h08b1
ttaataggaagacgagagaacagaagagccaaagacactaaaacgaaatggcatcctcctcttcctttctcctccttgctgcacttcttgcgttagtctcatggcaggccactgcttttgatcctagcccactccaagacttttgtgtcgccgacatgaattcaccaggtactatccgttttgtcatcatgttttcaccaaatacatatgttgaaatctatttccggaaattatatccaagtcgaaacaactttgtaaaatctgagcttacatgtatatctcttgtgcccccagtccgtgtcaatgggtttgtttgcaagaaaccgatggaggtcaatgcagatgacttcttaaggcggccaacctcgacaagc

SEQ ID NO: 10296 - DNA, 458 bp, Triticum aestivum
  Clone ID: uC-tsrow189091h10b1
tttttataatacagatacatatgcgaaggtgcacgaatctaaggataatccgaagcttttgactagtggcacatcctacaaccgaaaaaactcttgccatccttcttttaatttcatttagctacttggccatatctttgatataggtttttgctcctgcctttactgtggttgcagattttttttagcccagaccatgtgggtaatgactcggaatctgttctaatattttggtttgcgatctagctctccattgtttgatttgttacctttaactcttgatccctgtgttctattggtcttctgcaagtgttgcaggatataatagttaggagtttgtgcccaaacctttgctctgtacatggagtcaggtcagtgtcttgtagatggtctgtttgtttcatttgttagcgccacctccatgagttggcttgcaggactggatctggatctggcct

SEQ ID NO: 10297 - DNA, 468 bp, Triticum aestivum
  Clone ID: uC-tsrow189091h11b1
tggacgcgtgggcgattttcggccgacgggttctaccgtgatgttcgtttcggcgctatcgtccagggcacggccaattcatgttgaccggaaacaacgatatgaagccgccgattcctaaacgaccccggcggatggctatgtcgccggaatcagcacctttagcctccggcagtagcagcttcatcccagatgatataatcttctttcagatactcgtacttcttcctgtgaagtcccttgtgcgcttccaaaccgtctgcaagtcatggcgcaccacattaaccagcatcagtttcgtgcgctggcacctggagctttccaagcgaacaaggtcgaccatggtcctcgtgccacgcaagtatcaggaggaccgacggaaggcgtgttctagattactcagtatcttcagcttccagccaggggaaagcaagtgtgcggagcttatcttccgaaaggaatttcatc

SEQ ID NO: 10298 - DNA, 473 bp, Triticum aestivum
  Clone ID: uC-tsrow189094a01b1
ttgcctacgcgtccggtggctcaagaacctttggcggaaggggtcctgttggctttgatggttcaacataccaaccgtacaataaccgacatggtttctacaatggctatatgccacaacctgttcccacacatccctactatcatggcctctattttggtatgggaggcaatccctatgcaaatgcatatccaaaccatgcagtcatggcaaatgttccaaacatggtggcaaggcgtccagtatatagcccatatcccccaatgtatcctggctatggttttgcatacagaagtggttatgcgggtgctgcaccttctgttcagtatggcgttaatggtggcagggattacatgaatgaccaagactctatggatgtacaagaacttgacagcactgctaccattgctacaaagtttgaatacatgaagctaggttcacaatgacgttctgggcaattatttttacactga

SEQ ID NO: 10299 - DNA, 420 bp, Triticum aestivum
  Clone ID: uC-tsrow189094a03b1
ttcctacgcgtccgcccacgcgtccgcacttctcccgtcccgtccccagccaacctcccatccccgtctcgcgtcgcagcggcagttccactccctcgccatgggcaagattaagatcggaatcaacggtttcggaaggatcgggaggctcgtcgccagggtcgccctccagagcgacgatgtcgagctcgtcgccgtcaacgacccctttatcaccaccgagtacatgacctacatgttcaagtacgacaccgttcacggccactggaagcacagtgacatcaagctcaaggacgacaagacgctgctctttggcgagaagccagttaccgtcttcggcgtcaggaaccctgaggagatcccgtggggtgaggctggtgccgattacgttgtggagtccaccggtgtcttcactgacaa

SEQ ID NO: 10300 - DNA, 209 bp, Triticum aestivum
  Clone ID: uC-tsrow189094a04b1
tgggtgaccgcgccacgcatgctcctcccccgcctgctccccgtgcaccgcctcctcgccggcggaccccgccccctcctcctcctaccaagccgtcgcctcgctccccggccgcccgccgccgactccatgtcctactactgctccgcgcccgcccgccgcaggggcccgctgcggggggtggtgtacgacatggacgggaccctgac

SEQ ID NO: 10301 - DNA, 221 bp, Triticum aestivum
  Clone ID: uC-tsrow189094a06b1
tccctcgcgtccgcggacgcgtgggcgccgacgccgcctccttctcctcctctcggctccttctccttccttccagtttcagccatgggtaaggagaagactcacatcaacatcgtggtcattggccatgtcgactctggcaagtcgaccaccactggccatctgatctacaagcttggaggtatcgacaagcgtgtgatcgagaggttcgagaaggaagc

SEQ ID NO: 10302 - DNA, 476 bp, Triticum aestivum
  Clone ID: uC-tsrow189094a07b1
tttctcattcccccacctcccctcccgtcccgataaggcggacagcgaccgagagaagctcccggctcccctcctctcccctctcatcgcctgggagaatccgacaagctccatccatccagaggagagggcaggaggcggaggagggacgagcggccgtgcctacctatctatctacgccgccggaatggactcggagcactggatctcgcgcctggccgccgccaagcggttctacgccgcgcagctcggccacgccgatcgggcggggatggacgagctggacatggacggcgacgagaacgcgggcaggcccgacttcgcctgcccctactgctacgaggaccacgacgtcgcctccctcgtcgcccacctcgaggaggaccaccccttcgagccccacgccgcgccttgccctgtctgctccgaaaaggtttctaaagatatgcttaaccatatcaccatgcaacatgggt

SEQ ID NO: 10303 - DNA, 254 bp, Triticum aestivum
  Clone ID: uC-tsrow189094a08b1
gagcactggatctcgcgcctggccgccgccaagcggttctacgccgcgcagctcggtcacgccgatcgggcggggatggacgagctggacatggacggcgacgagaacgcgggcaggcccgacttcgcctgcccctactgctacgaggaccacgacgtcgactccctcgtcgcccacctcgaggaggaccacccctttgagccccacgccgcgccttgccctgtctgctccgaaaaggtttctaaagatatgct

SEQ ID NO: 10304 - DNA, 359 bp, Triticum aestivum
  Clone ID: uC-tsrow189094a10b1
ttctgctccacgcgtccgccaaaccagaccaaaaacttcccctccccaactctctctccgcccctgcgtgaaccgcggagcaaggaaggaggagcccgtcgggctactaatctcgggggttccccctctgatccgggcggtttcggccgttagctgctgggggaggagccgcgccggttcgtggcgccggcgtcggtggccgggggtcgtcggtccttccttggttctctcgtcatcggaaaaataaatcggtcgatctgcctctgattgcctcgcgcggttgggcttctccggtggggcaaaggcaggattttgagccactttgcccctaaaattaaatctgatttaatgggcgacca

SEQ ID NO: 10305 - DNA, 102 bp, Triticum aestivum
  Clone ID: uC-tsrow189094a11b1
agctagcttgttcatcttgatctagcaagtcttcctgctgggtctctcttcggggatatgagtgggaacaactttggggacagcatggggtggggcagatcg

SEQ ID NO: 10306 - DNA, 242 bp, Triticum aestivum
  Clone ID: uC-tsrow189094a12b1
ccggaatgtccgtatcactggacagcggacagcacaaaggaaatttcgatccaactttattgatgcgtcaaataacctacaagatcgcactatccctatatacatcatcgcactcgcgtacgtctctactcctctttgtccacagggacaatgtacaatcaactagcactgctactctttttccaccccctcccattctggttttgacctcttcaagcagcatgtgcaacccaggggagtcg

SEQ ID NO: 10307 - DNA, 253 bp, Triticum aestivum
  Clone ID: uC-tsrow189094b01b1
tggtacgcgtgggcggacgcgtggggtgcaggttggtgaggataagggggagtggaaggttcaacataccaaccgtacaataaccgacatggtttctacaatggctatatgccacaacctgttcccacacatccctactatcatggcctctattttggtatgggaggcaatccctatgcaaatgcatatccaaaccatgcagtcatggcaaatgttccaaacatggtggcaaggcgtccagtatatagcccat

SEQ ID NO: 10308 - DNA, 353 bp, Triticum aestivum
  Clone ID: uC-tsrow189094b03b1
tgggtgaccgcgccacgcatgctcctcccccgcctgctccccgcgcaccgcctcctcgccggcggcccccgccccctactgctacttccaagccgtcgcctcgctccccggccgcacgccgacgaatccatgtcctccgactgctacgcgcccgcccggcgcaggggcccgctgcggggggtggtgttcgacatggacggaaccctgacggagcacgacatagactatcacgtcaaggaccaagaggtgcaccgtgcagaggcactggaagcacagtgacattaagctcaaggacgacaagacgctgctctatggcgagaagccagttaccgacttcggtgtcaggaaccctg

SEQ ID NO: 10309 - DNA, 260 bp, Triticum aestivum
  Clone ID: uC-tsrow189094b04b1
tttgctctgggccgcgctgcgggccgacatgacgctcgcggggtttgacggcttccgcatccagcgctccgaccagacgttcctgttcctgggcgatggggcgcggccggaggatgctgggggtaaggagctgctgccgggttctctgatagtgctgtctcataaggataaggagatcactgatgcgctggaaggggccggcgtgcagcctacggagtcggaggtggcttatgaggtggcattgatgttcaagacgaata

SEQ ID NO: 10310 - DNA, 262 bp, Triticum aestivum
  Clone ID: uC-tsrow189094b05b1
tctgatggttgcagccataataactcttctcttcataatcgcgatcaacgtggcaatcgggatactaccgcatgctgataactttgctcatattggtggattcttgaccgggttccttttggggtttggtctgctggcaaggccgcaattcggttggttggaacgcagcgagctgccccacactaatcagcctcctaagtacaaaccataccaatatgtcctgtgggttgtggcactcgtcttgctgctcgtcgggttcacg

SEQ ID NO: 10311 - DNA, 117 bp, Triticum aestivum
  Clone ID: uC-tsrow189094b06b1
tgcgttcgcgtgggcacggtgagcgggttcaacaagacggggctgccgggcgccatctggaacttacacggcaacctactccaaggtggacagcgccggaggaatctgcgtgctctc

SEQ ID NO: 10312 - DNA, 150 bp, Triticum aestivum
  Clone ID: uC-tsrow189094b07b1
ttctgcccacgcgtccgaaattatatgatatagttaaccactatttatattaacttcttctgtacacaatgttcatgagttcatgtattttattgtgtcacttgtgtttactctttttttaatgcaagtttacagctactcggagttcct

SEQ ID NO: 10313 - DNA, 418 bp, Triticum aestivum
  Clone ID: uC-tsrow189094b08b1
gtgccaccacctcctcgacccgggccaatcgaactagaacaagcgagcagagtggtctggtcgggtggccgatatggggcgaggcagggcaccgtgctgcgccaaggtcgggctgaacaggggctcctggacgccgcaggaggacatgcgccttatcgcctacatccagaagcacgggcacgccaactggcgcgccctcccgaggcaggccggcctgctgcgctgcgggaagagctgccggctccggtggatcaactacctgcgccccgacctcaggcgcggcaacttcaccgccgaggaggaggccaccgtcatcaagctgcacgccttgctcggcaacaaatggtccaagatcgcggcgtgcctgcccgggaggacggacaacgagatcaagaacgtttggaacacgcacctgaag

SEQ ID NO: 10314 - DNA, 440 bp, Triticum aestivum
  Clone ID: uC-tsrow189094b09b1
tttttgcaacggcaaggcgttcccggagcacgtgctgcagtggatcgcgctcaacttcctgctcgcgggccgcgacacgtcgtccgtcgcgctcagctggttcttctggacggtcatgcagaggcccgacgtggagcgcaaggtgctcctcgagatcgcgtccgtgctcagggaaacgcgcggcgaggacacggggaggtgggcggaggagccgctggacttcgacgagctggaccgcctcgtgtacctcaaggcggcattgtcggagacgctgcgcctgtacccgtcggtgccgcaggactccaagtacgtggtggcagacgacgtgctccccgacggcaccgtggtgccggccggctcggcgatcacctactccatctactcggtggggaggatggagagcatatggtgcaaggactgcgtggagttccggccggagc

SEQ ID NO: 10315 - DNA, 104 bp, Triticum aestivum
  Clone ID: uC-tsrow189094b10b1
tggttgaggcaagcaactcgcgttctgctcaataaaaaaaaaaaaaaaaaaaaataaaaaaaaaaaaaaaaaaacaaaaaaaaaaaaaaaaaaaaaaggggcgg

SEQ ID NO: 10316 - DNA, 364 bp, Triticum aestivum
  Clone ID: uC-tsrow189094b11b1
tttcgcacgtctctttctgtcttttctctccctctcgatccaaatcgagcacgccgccggcgcttgcaaccacctcgaccccctgccccggcgaactcctcgcccctcggtcctgggctcgccagccaccacttcgcccggcggccacagacacttcccccttcgcccccagcaccggcggccccgtccacttcccccgtcgccatcgtaggcccaccggtggcgtgcagatatggcctctacttcctcttcgtcaagtcggagaccaagaccccgagcgggctgacggcgcggccagtgctcaccagctactacaagagtgagcagttcaagaaccgtccctacgacccgtaccacaactaca

SEQ ID NO: 10317 - DNA, 391 bp, Triticum aestivum
  Clone ID: uC-tsrow189094b12b1
tttcggacgcgtccggaagcacacaagaagctcatagccattcaaagcctcttcatctccgaagctccaacccaaccgaggatgtcttgctgcggaggaaactgcggctgcggcaccgcctgcaagtgcggcaacggctgcggcggctgcaacatgtacccagaggccgaggccgccggcgccaccctcctcgtctccgccaccgccacccacaaggcgagctccggcggcatggagatggcggcggagaacggcggctgcggctgcacccagtgcaagtgcggcaccagctgcggctgctcctgctgcagctgctagatcgatcattgaccatatgcatgcaccgtgccgtgcgtgcatcatcgatcatatcgatctactactaccatac

SEQ ID NO: 10318 - DNA, 381 bp, Triticum aestivum
  Clone ID: uC-tsrow189094c01b1
tttcctctcgttcgcagatgtatgacatcttccagcttctcccagggaagattcaagttggtgtcttctctgccaccatgccccctgaagcccttgagattacccgcaagttcatgaacaagccagtgaggatccttgtcaagagggatgagctcacccttgagggtatcaagcaggtctatgtcaatgtggagaaggaagagtggaagctcgacacactgtgtgacctgtacgagactcttgccatcacccagagtgtcatctttgtgaacacccgtcgcaaggtggactggctcaccgacaagatgaggggcagggaccacaccgttttcgtcactcacggagacatggaccagaacactagggacatcatcatgaggg

SEQ ID NO: 10319 - DNA, 284 bp, Triticum aestivum
  Clone ID: uC-tsrow189094c02b1
tggtacgcgtgggcgaggttattgaccgggcaaaggttctgtttgatgaagtatcacgtactttacacctgatctccgagaaaaaggctcactgcagttctctcaatgtggaatgtaccaattacattgctgaacttgaaagcatgtttcggaaggaaaagttagaatttgaggtgcgctgccttttgataccgcattcttgtaacatatccattaaagtagagcttaattgtaattccaacacatggaaaaaaaaaaaaaaaaataaaaaaaaataataatat

SEQ ID NO: 10320 - DNA, 448 bp, Triticum aestivum
  Clone ID: uC-tsrow189094c03b1
ttggttttcacccgcttcttcagcaagaggcagactaggttcttctgggtatccgccgtcgtgccattgacgtcggacatgctcgggagcctactggtctacttcacccatgccgaaaaccatggcgttcaaataatcggtgatctgaagaaaggcgctgaacccaatctccgttacaaacctccaattcacgccgccgtacatgatgctcgccttgaagaccggcctcatcaccggcgtcatcgccctcgccgaagggatcgacgtcggccggagcttcggcatgttcaagaactaccacatcgacggcaacaaggagatgatcgccatcgggacgatgaacatcctgggctccttcacctcctgctacctcaccacggggcccttctcccggtccgccgtcaactacaacgccgggtgcaagacggtcatgtccaacgtgatcatg

SEQ ID NO: 10321 - DNA, 377 bp, Triticum aestivum
  Clone ID: uC-tsrow189094c04b1
tttccttgcgtccgattgcacagcaaagtctccaagaattcaaagcctgcaagaccttaacttgatatcatggctgggcgtggacttttagctgcaggtttggtcctcctcgccgccgtcgccccggcctacgccgcggactacaccgtcggcgactcgtcgggctgggctagcggcgtggactacagtacctgggcaagcgacaaaaccttcaccgtcggtgacacgctcgtgttccagtacggcgcgtcgcacaacgtggcggaggtggggtcgtcggactacagcgcctgctccgccaccaactccatccagtcgttcagcgaccaggacaccaaggtcacgctcaccaagcccggcacgcgctacttcatctg

SEQ ID NO: 10322 - DNA, 374 bp, Triticum aestivum
  Clone ID: uC-tsrow189094c05b1
tgcctacgcgtccgcccacgcgtccgcccacgcgtccggcccgccgcgacgccattagcagagccagagcagtgggggagaaggttctagaggaagaggaagaggaagatgaaggtgatcgagaagatccaggaggcggcggcgaatggccggaccgtcttatacttcgagtacttcccgcccaagacggaggagggcgtggagaacctcttcgagcggatggaccgcatggtggcgcacggactcaacttttgcgacatcacctggggcgcccgcggatacaccgtcgacgtcaccctcgacatcgacaaccgcatgcagaacatggtatgtgtggaaacgatgatgcacttgacatgcactcaacatgccag

SEQ ID NO: 10323 - DNA, 446 bp, Triticum aestivum
  Clone ID: uC-tsrow189094c07b1
ttttcggaccgtggtaacttacagtctctacaagctctaagagaggaaggatagcataggcctcaagctccagcgatgcatgtaccaccgactctactgggctatgtagatggtccacatcatgggcatgaagctggccaaccgtgggggggaatgcccccagagttggcagggatgtggattggaatcattgttctcctggtcatcaactccaccatcttcttcattgaagagaacaacgccggcaacgcagctgctgcgctcatggccaaccttgcgcccaagacaaaggtgcttagggatggtcgatggggcgagcaggaggcatcaatcttggttcctggtgacattgtcagcatcaagctcggtgacatcgtccctgctgatgctcgtctcctcgagggtgatcctttgaagattgatcagtctggacttacaggagagtc

SEQ ID NO: 10324 - DNA, 427 bp, Triticum aestivum
  Clone ID: uC-tsrow189094c08b1
ttctggcagaaacagagcgggaagcaagcagccataggcagcgccggcatggggaggtcgccgtgctgcgagaaggcgcacaccaacaagggggcgtggaccaaggaggaggaccagcgcctgatcggctacatcaaggcgcacggcgaggggtgctggcgctcgctgcccaaggccgcggggctgctgcgctgcggcaagagctgccgcctccgctggatgaactacctccgccccgacctcaagcgcggcaacttcaccgacgacgacgacgagctcatcatcaagctccatgccctcctcggcaacaagtggtcgttgatagcggggcagctgccgggccggacggacaatgagatcaagaactactggaacacgcatatcaagcgcaagctcctcaaccgcggaatggacccgcacacgcact

SEQ ID NO: 10325 - DNA, 466 bp, Triticum aestivum
  Clone ID: uC-tsrow189094c09b1
tttctgggatgggattgtggcatgttcatgctcaaatacattgacttccacagcagagatatgggccttacttttgggcagaaacacatgccttattttcgtcagaggactgccaaggaaatattgaatttgagggctggataatgcagaggcgcatcataggtataaacaaaaggaatgtgcaaactggaggcaagtgtatgtacttaatagaatgcagctatgtcttccctggagtaccaaatgcaaggatttccgaagcccaggggttcaaaccagtcatcctgcaaggatcaagccttaagaatagtttgcaggtgaattggctgccacaatggatgttcttggcgcagaaagccattagctaacggaaagggtgttgcaaacttgcaatcgtcgtgttgtgtccgtctgttagactgcagagtcactgagagttgaaaggagggtatggttggaacttatt

SEQ ID NO: 10326 - DNA, 359 bp, Triticum aestivum
  Clone ID: uC-tsrow189094c10b1
agctcatccgtctcatggatagctgccttggttacacttatgtcatgtcaaccccgaacacgtgcacgtctgatatgaaaatagttgattcgaccgatacagagttaaaaggctacagaaaaagcccgtcctggagacggtccgcctgcacgaagaacatggcgtctggcctctccgaggcccacaaactgatcagctaccgtggacactggaatagcatcatcttgctcttctccgatgggctcatcaacaagggggactactttgatggagccaaggacttcgtctcaaaagtacctgtccacacgtttactctcggcggagacgcgaacaaccacgttcttcatgccatggcaaag

SEQ ID NO: 10327 - DNA, 381 bp, Triticum aestivum
  Clone ID: uC-tsrow189094c11b1
cccacgcgtccgctccagttgaagatgaaggtgcagaaatggagggggaccaaggacaatcagctccgggcttgtctgaagcgaaagatggacctgaagaaatggaggagcaacaagaagagtcagctcaggacatgtctgaagctgaagaaatgaaggagcgccaggaacattcaggtcaggacatgtctgaagctgaagatgagcctgcagaagtggaggagcaccaggaacattcagctgtggagatgagtgaagctgaagacgaacctgcaggagtggaggagcagcaagaagagtcaggtctaggcatgtctgaagatgcaggcgatcctgcagaaatgaaggggcaccaaggacagtcagctgaggacatgcctg

SEQ ID NO: 10328 - DNA, 420 bp, Triticum aestivum
  Clone ID: uC-tsrow189094c12b1
tggtcgagcgccgcgaccgacgcacgcgcgcgcggcggcgagatgaaggtctccgtgaagacgctcaagggctccaaattcgagatcgaagtgaaccccgccgacaaggtttctgatgtaaagaagctcattgagagttcacaagggcagaatgtgtacccagctgatcaacaaatgctcatataccaagggacagttcttaaggatgagactacgttggaggaaaacaaagttgttgaaaacaactttcttgtgataatgcttagacagaataagggctcatcaagtgcagctccatctaaatccaaggaaccctcaaatcaggcaccccctactcagacagtgcctgctactcctgcctctcaagcaccagccacgccagcaccttaagcagtggctgcgccagcacctattgtacct

SEQ ID NO: 10329 - DNA, 249 bp, Triticum aestivum
  Clone ID: uC-tsrow189094d01b1
tttcttacgcgtgggcgaggttattgaccgggcaaaggttctgtttgatgaagtatcacgtactttacacctgatctccgagaaaaaggctcactgcagttctctcaatgtggaatgtaccaattacattgctgaacttgaaagcatgtttcggaaggaaaagttagaatttgaggtgcgctgccttttgataccgcattcttgtaacatatccattaaagtagagcttaattgtaattccaacacatg

SEQ ID NO: 10330 - DNA, 284 bp, Triticum aestivum
  Clone ID: uC-tsrow189094d03b1
tttcttatcgcgtccggtcaaccctggtttctagaaccttgcagataagctaccatatgggctcgagagtatgtcttgccgcggacgtggaggtcgaggccgtagcggccgcggcggcggacgtcgtggcagaccgggcggagtgctcagacaagctggtggcgctggcgacgtgcctgacgactagagcaggggcaggggcaggcgccgactcccgattgttgccgcgggctgaagacagtgctgcacaccagacacaagtgcctgtgcgggctcgtcaagga

SEQ ID NO: 10331 - DNA, 395 bp, Triticum aestivum
  Clone ID: uC-tsrow189094d05b1
tttgtctcgccctgctcttgctactcgccatcgtcgtgccgtttactcagacccggacgcagagcgcacgggacaaggctgccatggcggaagacgcggggccgttggtgggaggcatcaaggactcgccgatgggccaggagaacgacctcgacgtcatcgcgctcgcccgcttcgccgtctccgagcacaacaacaaggccaatgccctgctggagttcgagaatgtggtgaagctgaagaagcaaactgttgctggcacgatgcactacattacaattcgggtcactgaaggtggggccaagaagctctatgaagctaaggtgtgggagaaaccatgggagaactttaagcagctccaggagttcaagccggtggaggacgctgcaatcgca

SEQ ID NO: 10332 - DNA, 92 bp, Triticum aestivum
  Clone ID: uC-tsrow189094d06b1
tgggtttggctgatcttgttactcaacataggagggccgtgtacttagacccggacgcacagggcacggtacaagggtgtcatgggggaaga

SEQ ID NO: 10333 - DNA, 433 bp, Triticum aestivum
  Clone ID: uC-tsrow189094d07b1
tttttggtagtcgacagagtccccaccccacactcacgcacactcctcctcatctcgcccggggcgaaatcgacgccacagcgggagggaaaaggcttccggggttggcagggattccgcctcttatacgcctgcccgcctcgccagattcctcacagcttccctgccccgagcggagatcctgaactccggaggccgtcgtcgggggtaagattcggcggccatgtcgggcgccgtgctggtcgccatagcggcgtccatcgggaacctgctgcaggggtgggataatgcgaccattgcaggtgccgtcctgtacataaagaaggagttcagcttggagacccagcccttgatcgagggcctcatcgtggccatgtcgctcatcggggcgacggttatcaccacgttctccggggcggtggctgatgctgtt

SEQ ID NO: 10334 - DNA, 399 bp, Triticum aestivum
  Clone ID: uC-tsrow189094d08b1
ggccgggatgtacatcgtctccgtcgcctcgctcaagcgcggcatgagccactacgtcctcgtcacctaccgcaacctcgtcgccacgctcgtcatgctgcccttcgccctcttcttcgagaaggggacacggcccaagatgacactccgcatcttcatcaagatcctggggctggcgctgctcgagcctgtgcttgaccagaacctgtactacgtgggcaacaagctgacctcggccagcttctcgtcggcgctggtcaacatcctgccggccgtcaccttcatcatggccatcgtcctgcggatggagaagctccgccttcggagctcccacagccaggccaaggtcgccggcaccatctgcaccgtcatcggcgcggtgctgatgatcatgtacca

SEQ ID NO: 10335 - DNA, 300 bp, Triticum aestivum
  Clone ID: uC-tsrow189094d09b1
tttctgcgctgctggagttcgagaggctggtgaaggtgaggcagcaggtggtggccgggtgcatgcactacttcaccatcgaggtcaaggaaggcggtgccaagaagctctacgaggccaaggtgtgggagaaggcctgggagaacttcaagcagctccaggacttcaagccggccgcctgaaaagatgtaaataaatatgttatgtgagctgaaccgctcaagcttgtggatggggcctatccaacacgccagcctcactggatactggtgtaatatgatgaaataaacctgcttgctg

SEQ ID NO: 10336 - DNA, 334 bp, Triticum aestivum
  Clone ID: uC-tsrow189094d10b1
tttcttcggacgcgtgggtgtcactgtgcctgcttacttcaatgattcccagaggcaggcaaccaaggatgctggtgttattgctggtcttaatgtgatgcgtatcatcaacgagccaacagcagctgcaattgcctatggtcttgacaagaaggctaccagtgtcggtgagaagaacgtgcttatctttgacctcggtggtggcacttttgatgtctctctccttaccattgaggagggtatttttgaggtcaaggccacagctggtgacactcaccttggtggggaggactatgacaaccgtatggtgaaccactttgtccaagagttcaag

SEQ ID NO: 10337 - DNA, 334 bp, Triticum aestivum
  Clone ID: uC-tsrow189094d11b1
caaaagagtgagactacctagagcactcagcaccgtcgtaggctcgtcgccatccgttcagtgtctcagagtctcagcgtgcgtgtctgatctgatggcggcaccagcaggagattcctccggcggcgacaagtacaggtctcacctggccggcgagggcgagaagaacaccgtttggcggcacggcgcgccgcccacctacgacgccgtgaacagcctcttcgaggccgggaggactcacgagtgggcgaaggggtcgctggaggagacggtgcagaacgcgatcaagacgtgggagatggagctgtcgcacaaggcccgcatcggggacttc

SEQ ID NO: 10338 - DNA, 317 bp, Triticum aestivum
  Clone ID: uC-tsrow189094d12b1
tgggagggcattcccccggaccagcagcgtctcatcttcgctggcaagcagcttgaggatggccgcacccttgcggattacaacatccagaaggagtccaccctccaccttgtcctccgccttcgtggaggcatgcaaatctttgtcaagaccctcactggcaagactatcaccttggaggtggagtcatctgacaccatcgacaacgtgaaggccaagatccaggacaaggagggcatccccccggaccagcagcgcctcatctttgctggtaagcagcttgaggatggccgcaccttggcagactacaacattca

SEQ ID NO: 10339 - DNA, 453 bp, Triticum aestivum
  Clone ID: uC-tsrow189094e01b1
tgatgtgactcgatcggatctccagccgacgccggcgaccatggctcgccgtcaccacctcgtcctcctcctccctctcctcgcgcttgccgtctccttcgtcgccgccgcccctgagggacatggagatgccgccgccgccttcatcgacggcgcgccgcaccgctacctgcgggatcagcaggacgaccaggccacgtcgatgtcacttgatgaagtttctgcagctgtttccgtcttgcttggttttgcaccacctgccatgcttcccgcgccttcttctgcaaagttaaacaagctgctactcccaaagccatttgacaggcctcgtgctgttttcttgatgcaaattgatggatcccatgactctgtcgatagcttcgtatctgatgccggtagtatttacaaaaccaagattgagggtgcacaaaatgctgctacagggcttacaga

SEQ ID NO: 10340 - DNA, 192 bp, Triticum aestivum
  Clone ID: uC-tsrow189094e02b1
tgttatcttcttcttcttctgattctgattctgaggttgatgaagcgaaccaagagaatggcaatgggattactgatgcactgaacgaacgagttattgagctagaagatgagctcaaggaagcaatggagaaacttgaggcactcgaggaaaagaatatgcggtgccaatgtgaaaaccttgaagagaagt

SEQ ID NO: 10341 - DNA, 412 bp, Triticum aestivum
  Clone ID: uC-tsrow189094e03b1
tggtttgaactacagaaggacaactcaacagggtggcagccggggccagagcacccctggcaccggagcttcaaccaactagcagcggcatctatccaacatgccatatggccatggcgtcgccaagctcaggtgagttggaggtagctgagcacccccctaacaccgtgctcgacgacgctcgacacccgcacgcatgaacaccgatggcggcgggcctgttcataccttttttcctgactttttgtacctgtagaatatagaatgtacaagtttttgcaaatatttattccgacatataagaagggacaaaaggctttaggtcagacttcagaggaggaaaaataagcaagcagttcatgtatgtatgtatgtatgcgggctcaaattctgtacattaacatggaagagt

SEQ ID NO: 10342 - DNA, 356 bp, Triticum aestivum
  Clone ID: uC-tsrow189094e04b1
tttctcgcgtccggtgctcttcgtcctcgccgccggctaccttcccttcaacgacgccagcctcatcaacatgtaccgcaagatctacgccggccggttccggtgcccgaactggttctcgccggcgctccgccacctgctacgccgcatcctcgaccccaacccgggcacgcgcatcgacacggacggcatcatggagcacccctggttccgccacggcgcgagcggcgacggcgagctggagaagctgatgcgcgggcacgaggaggaggcgtggttcgagacggagttcaaggaggacatggtgcgggacatgaccgcgttcgacatgctggccttctcgcccggctcggacc

SEQ ID NO: 10343 - DNA, 365 bp, Triticum aestivum
  Clone ID: uC-tsrow189094e05b1
tggtttgaaaccagcagcaaatcccacatgcgactccgccttcccttccttttcctacccccgatcgaaacagagagctagcttagagagatattcccgcgaatcttctgctccgattccaagcccgtcccggtctcggtcgcgtcccactcccccttcaatccttcaatccttcttcaccggaacctgcggcggcagatcgagtccaatcgtgaggcagagtaacagggcgaacgcgggagccagagcgagaggtcgggaagaagaagaactcaccggcgggggcgaaccggacatgtgcgtggagggattcgaggacgcgcagatcgagaggccggcagatttcgcggtgggtaaaccccctc

SEQ ID NO: 10344 - DNA, 408 bp, Triticum aestivum
  Clone ID: uC-tsrow189094e06b1
ttgatttgcatcctcccgtcccctctcacacgagagccccaaagctagaagaggaggaaggataccgccatggggagagctccgtgctgcgacaaggcgagcgtgaagaagggcccatggtcaccggaggaggacgccacactcaagtcctacatcgagcagaacggcaccggcggcaactggatcgcgctgccacagaagattggtctgaggaggtgtggaaagagctgccgcctccggtggctcaattacctccggccgaacataaggcacggtggattctcagacgaggaggacaggatcatcctcagcctctacatcagcatatgcagcaggtggtcgataatagctgcacagctgccggggaggacggacaatgacatcaagaactactggaacacaaggctc

SEQ ID NO: 10345 - DNA, 182 bp, Triticum aestivum
  Clone ID: uC-tsrow189094e07b1
ttctggtttgggactgcagctcgttttgaaaagtcaggactatgatgacaataatgcggccatagtatccggtctatgcggggtctgtaatttgcttagatgccccttggccgccattttctagcttggcataaactatgaccacccttttgaggggtcgaggaagatatgatggaatgaca

SEQ ID NO: 10346 - DNA, 407 bp, Triticum aestivum
  Clone ID: uC-tsrow189094e08b1
ttctcccacgcgtccgcgaggacctcgagatgggcgtcatttacgccaccttccccatgaagcgcatcggcacaaagctggccgccgccgacatggctcgcctcgccgccgccgccacccgggaggcccggcgctccgccaaggtgtcctccgtgggggccgcggcggcggcagcggctcagcccgagccggccatcaccttcgtgccggccgcggaggaggcgccgtcgccgagggcgcggctggacgagatggtggacgacgcggtggccgccgagatcgacgtgctcaagcaccggctcagcagcgcgcgctccaggcggcccaacctcgagaccatccacgaggagaatcacctactgtgcagacgctgaaatatactgctagcagctcatttttcttcttct

SEQ ID NO: 10347 - DNA, 481 bp, Triticum aestivum
  Clone ID: uC-tsrow189094e09b1
ttctgggatcacgcagggttcacgttcacgccgccgccgttcatcacgtccttcactgagcttctatcagggtctggcgccggcgacgtggaggggtcgccaagggggttcaaccgagggggtcgggccggggtgcccaagttcaagtccgcgcagccgcccagcctgcccatctcgtcgccagcggcgcccttctcctgcttctccatccctgcaggtctcagccctgctgagctgctccactctcccgttctcctcaactactctcatatattggcgtctccgactacaggtgcgatccccgcgcggagatacgactggcaggcgagcgccgatctgaacacctttcagcaggatgaggtcggccgtggagacagcggactctttggcttctcctttcacgcagtgaagcccaacgccacggtcaacgctcaaacaaattacttacctttattcaaggaacaacagcagcaacaacaac

SEQ ID NO: 10348 - DNA, 421 bp, Triticum aestivum
  Clone ID: uC-tsrow189094e10b1
ttctgctcccctctcgctctctccaccaaccaagaacagcaggaactcgacctcggagcagcaacgaatccgccgccgcccggcaaaagggatccaaagctccaatggctggcaagtacatcgtcgccggcctcgtcggctcctgtgtcatctcgtatgcctgtgactacatcgtttctcagaagaagatcttcggtggcaccatcccagggactgtgtccgacaaggagtggttgaaggcgacggagcagaggttccaggcctggccccgggtcgctgggccgccggtcatcatgaaccccatcagccgccagaacttcatcgtcaaggacctcaacccctgaggctcaagatcttaaggtttgcggtcggttggaacctttaccctgatggcgatgcctgttgctaaatctacctatgt

SEQ ID NO: 10349 - DNA, 402 bp, Triticum aestivum
  unsure (1)..(402): unsure at all n locations
  Clone ID: uC-tsrow189094e11b1
tgccacgcgtccgcgacgagcggctgctggtgtacgagtacatgaagaacggcgcgctctacgaccacctccaccccaagggcggcggcgccgacgccgacgcggcgtcgccggtggtgtcgtcgtggaagctgcgcatcaagatcctgctggacgcgtcgcggggcatcgagtacctgcactcgtacgccgtgccgcccatcatccaccgcgacatcaagtcgtccaacatcctgctggacggcgggtgggtggcgcgcgtgtcggacttcgggctgtcgctgatgggcccgccggagacggagggggngggcggcgcgcangcgcccgagcagcacctgtccatgaaggccgtcggcacggtggggtacatggacccggagtactacggcctgcaccacc

SEQ ID NO: 10350 - DNA, 336 bp, Triticum aestivum
  Clone ID: uC-tsrow189094e12b1
ttcgttcggtcaagacaatcttcgcgctcgcgctcgggaagatgggcgccactggggaaactcggctgcttagcgcagggagtgatggttatgtgaagtgctttgattatggggagctcaagatgacacactcgatgcggtatcccaaggaattgctgtccgtggcttgctcgccgtgtgggacggtgcttgttgccgggtcttcaaagggtgacatctttgtgcgcagaaggaagaagaatgcaacagaggaggtggaagaggaggttgtaagcagcgagttcgcctggacaatgcccaagccagagaagcaggcgctcaagccgagctactaca

SEQ ID NO: 10351 - DNA, 209 bp, Triticum aestivum
  Clone ID: uC-tsrow189094f01b1
tgcctacgcgtccgatccagtacagtggctgagcactcgagtgcagagccgattagccttccggttccggaacctgcaatggctgctgctccggcgacgacggcggaggtggtgccgcggatgaagctgggctcgcaggggctggaggtggcagcgctggggcttggctgcatgggcatgttcgcctactacgggccggccaagcccga

SEQ ID NO: 10352 - DNA, 283 bp, Triticum aestivum
  Clone ID: uC-tsrow189094f02b1
tttggtagtccagcagcactccttagctgcacttcggtcacttgcaacgatctccacaccacatagagacagagcgagagagagagggtgtgtgttgaagcaaagatgaagcttatggggagccggaggagcggaggaggcctgagcaggagcctcaaggagcacatggccaggctctacatcatccaacgctgcgttgtcatgctgctgtgctggcacgactgactccgatgcctcgctccatggatggatcttgttcttccattccatggatggtgtttga

SEQ ID NO: 10353 - DNA, 185 bp, Triticum aestivum
  Clone ID: uC-tsrow189094f03b1
ttggtgtggctgcccacgaccacatggggatcggccccttgctccggcagtgcggtgagctcttcgaggggcttgagactctcactgactgcggtggtggtgatgggactacggccaggtccatcgtcgaggcctaccgcgacatcaagtgcactgtgctggaccttccaaaggtcatggacaaa

SEQ ID NO: 10354 - DNA, 418 bp, Triticum aestivum
  Clone ID: uC-tsrow189094f05b1
ttggttgtcccaatcctcgatctgttctcagaccctcctccgtccgtcgcagctccagatttccttccccatggctccgatcaagatcggtatcaacggtttcggccggatcggcaggcttgtggccagggttgcgctccagagccccgatgtcgagctcgtcgccgtcaacgaccccttcatcaccaccgactacatgacctacatgttcaagtatgacactgtccacggacagtggaagcaccatgaagttaaggtgaaggactccaagacccttctcttcggtgagaaggaggttgctgtgtttggctgcaggaaccctgaggagatcccatgggctgctgctggtgctgagtacgttgttgagtccaccggtgttttcaccgacaaggacaaggctgcagctcacattaagggt

SEQ ID NO: 10355 - DNA, 418 bp, Triticum aestivum
  Clone ID: uC-tsrow189094f06b1
tttgttttcccaatcctcgatctgttctcagaccctcctccgtccgtcgcagctccagatttccttccccatggctccgatcaagatcggtatcaacggtttcggccggatcggcaggcttgtggccagggttgcgctccagagccccgatgtcgagctcgtcgccgtcaacgaccccttcatcaccaccgactacatgacctacatgttcaagtatgacactgtccacggacagtggaagcaccatgaagttaaggtgaaggactccaagacccttctcttcggtgagaaggaggttgctgtgtttggctgcaggaaccctgaggagatcccatgggctgctgctggtgctgagtacgttgttgagtccaccggtgttttcaccgacaaggacaaggctgcagctcacattaagggt

SEQ ID NO: 10356 - DNA, 379 bp, Triticum aestivum
  Clone ID: uC-tsrow189094f07b1
tctgctgcagccctgagactcgagagcgatagagaaagcatggcggctgagatgacagtccccagcgacgcccagctgatcaaggcgcaggctgacctgcagcgccacagcctcacctacctcacgtccatgtcactcaggtgcgccatcgagctcggcatcccgacggcgatccaccgcctcggcggcaccgcgtcgttgcccgacctcatggccgcgctgtcccttccgccacccaaggagccgtttctcagccgcgtgctgcggctgctggccaaatccgacgccctggcgtgcaccgaagacggggtctacagcctgaccccgctgtcctacatccttgtggacggcgtactcatcgacggcgaggctaggcaga

SEQ ID NO: 10357 - DNA, 395 bp, Triticum aestivum
  Clone ID: uC-tsrow189094f08b1
tctaaataacatgccatcatctgtgatatcaagccacagcatgcatcttggagtccttgcaacagcctcccatgcaatctgcactgggaccctcttttctgttttctataaacccagaacaagtcaatctgagtttgtggtgagtgttaacaagtaccttgaagcgaagaagcagaacatttccgttggaatgagatttaagatgaaatttgaaggcgatgaagctcttgaaagaaggttcagtggtacaataattggtattgggagcacgccgatggtgtcaacatctctatgggcagattctgattggaaatctgtgaaggtccaatgggatgagccttcatccattcttcgtccagatagagtctcaccatgggaattggagccactggatg

SEQ ID NO: 10358 - DNA, 278 bp, Triticum aestivum
  Clone ID: uC-tsrow189094f09b1
tttttcccacgcgtccgatcggcgcacggtggtactccgagggaattaatgccatgcacctcaagggtgagtacatgccacctcgggatttcagcggacatggcactcatgttgcctcgacgattgccggaggagaagtgcacggtgtgagctatgccggcctagccacgggcatggcacgtggcggggcaccacgtgcacggttagcaatttacaaggtgttatggggcccgaacacagcagccagtgacagcgagcatgctctgtgccattgacga

SEQ ID NO: 10359 - DNA, 384 bp, Triticum aestivum
  Clone ID: uC-tsrow189094f10b1
tttctgcggacgcgtggcgagatggcccgcgacattgctcagaagcttggcttcagcgagcagtgcattgaggatgccaaggacaccatccagaagctctacaccatcttccgcgagaaggactctacccagatcgagatcaaccctctctccgagacctccgaccaccaggttctgtgcatggatgccaagttcggtttcgatgacaacgctgagttccgccagaaggagatcttcgagtggcgtgacaccacccaggaggaccctgatgaggtccgcgctgctcagtccaacctgaacttcatcaagctcggtggtgacatcggctgccttgtcaacggtgccggtctcgccatggccaccatggacatcatcaagatcaac

SEQ ID NO: 10360 - DNA, 454 bp, Triticum aestivum
  unsure (1)..(454): unsure at all n locations
  Clone ID: uC-tsrow189094f11b1
ttggttcatggttttctttggtcatgtatgagtggaaaagggaggcaggggagttccagtttgtgaggacagtggcgacatggttgactgaatggcaataggaagaaggcacatctcatataattgttttattcaagacaagtctacactctcttatgtcaaatttgcacagatttccctgccctaggcttatttctannagggggagagaagnanngtgttatttttttggggnggattacaaagaatggtagcgcatgaggagtattagccacggaggagggaggagactgacatgaggaaaacatattctggatcgatttggttctcatggtggcatcttccctgctttctcctttctttttatttccaacactctttggtacagagcgattaacaaacaactgaactgaatattgctttttctccttttcagataagttagtttacatta

SEQ ID NO: 10361 - DNA, 450 bp, Triticum aestivum
  Clone ID: uC-tsrow189094f12b1
tgcggacgcgtgggtgcccctgaagataagatcgaggaggaggatgtttgccctatctgccttgaagaatatgatgaagaaaatccccgctctatcaccaaatgcgagcatcatttccatctttgttgcatactcgaatggatagagcgaagcgagacttgcccagtctgtgaccagataactttgatagatgagatgtatgaatagcatgttgaccctggtggatcttctctaggagctcgtgtgtgcctgccgaggaggtttagtactagtccttttcctatggggaagtaaaatcagcaactactctgctcctaatatggtagtatgatctggtggaggtgctactggaatgcatcttgggagaacaaatgggaaataatgaaaaacacaagcatcaagaaatatgttacctaaaaaaacatccatccctatgtttatactagcatt

SEQ ID NO: 10362 - DNA, 224 bp, Triticum aestivum
  Clone ID: uC-tsrow189094g01b1
ttcgatggcgatcattacgaccaaggccgtgaagaagatcgtgtacgaccagaagctttgtcagctgctcgaggagtacaccaaggtgctcatcgccgccgtcgacaatgtcggctccaagcagcttcaggagatccgcaagggtatccgcggcgactccatcgtgctcatgggcaagaacaccctcatccgccgctgtatcaaggtgcactcggagaagaccg

SEQ ID NO: 10363 - DNA, 239 bp, Triticum aestivum
  Clone ID: uC-tsrow189094g04b1
tcctgatcgagccgcccacctcgagaggccgccataattcattccatccattcatccgctgccgcgtatataagcgcggccattggggcgctcgtggggtgctcgtcacatcgtcgcatcaggcgcgcgcaggccgagatcagatcggcggcggcggcggcgacggcgacggcgaccatgttcagcgggacgcagcagaagtgcaaggggtgcaccaagacggtgtaccccatggacca

SEQ ID NO: 10364 - DNA, 499 bp, Triticum aestivum
  Clone ID: uC-tsrow189094g05b1
tggtttcatttagcatggcaatgcccaataccaatagcatgttgagcttttcctgtatagcttatgcagctattgtcgtcctagccctaggcagtagaacctgtagttgcttgcagtttacttatcccaacttcaacgcaatcaatatggatgatttcaccttcagcccaggctcaacaattgcagatggtgccttgcagatcaccccaagtaccggaaacatgcgccaccggtcggggagagtggtttatgcaagggaaaccctcaagctgtggaacaacaagcgcatggcgcccacctcgttcaggacagatttcctgctcaacatccaacccggtcagaatggggctggagaaggtatggcatttgtgctcacaaacaatccatcgttgcccagcaacagcaatggccagtggcttggcatatgcaatgacacgacagacggcacgaatactgacccagttgtagccgtcgagtttgacacgagaaagagctatga

SEQ ID NO: 10365 - DNA, 335 bp, Triticum aestivum
  Clone ID: uC-tsrow189094g06b1
tttcttcagcttcgccgacctcacccatttctccttcatgcgctatttcatggcgacggagcatgcagttgtgctcgatgcgtatccgcacgtaaaggcatggtgggaggcgctgctggcaaggccgtcggtcaagaaggtgatagctggcatgcctccagattttggattcgggagcgggaacataccatgataaggcatatgctttgtgtgcttgagatgctctaatcgtctctacccaacccacgagaaataaagtaagcaaagcgtgggtgtggatatgaaataacttgtttcggtgaattgttttctaataccaattagaattgattctc

SEQ ID NO: 10366 - DNA, 337 bp, Triticum aestivum
  Clone ID: uC-tsrow189094g07b1
tgcgaccggggacctcgcatccaccggatcaaccagcttgggaagagagaacaaggtcttctacgggggacgtggagttttcggcgagatgttcggtcgcggcccgcctaacaagaacgacagcacgcgctactacgagatcctgggcgtgcccaaggacgcgtcccaggacgacctcaagaaggcctaccgcaaggccgacatgaagaaccaccccgacaagggaggcgacccagagaagttcaaggagctagctcaggcttatgaggctctgagtgatcctgagaagcgagagatctatgaccagtatggtgaggatgccctcaacgagggaatg

SEQ ID NO: 10367 - DNA, 437 bp, Triticum aestivum
  Clone ID: uC-tsrow189094g09b1
tgcggacgcgtgggcggacgcgtgggtcctgctctctcgcctttccccattccccccaccctccctctcttccgctcgctcgctccgggtctccctcctccctcttcacacccacctcacctcctctgctccctcttcgcgtgtccaagaaaggaaccaccaggcgggaacggcgtgagcgcagctggggctggagccggatcgaccccgttcgtctccagaggcggcggcacgggcgcaggagctccggatcggcgctcaagaagtaagagtccgcgctgatgtacacgttgctgatttcttctacctagacatactccagagcagcagctctgccctgccgccgtgatctgtaatcgccgttccaaaagacaacagtttagaaaggttgtcggcggcccaagctctgagcttcagcctgcatctagctagcgcag

SEQ ID NO: 10368 - DNA, 438 bp, Triticum aestivum
  Clone ID: uC-tsrow189094g10b1
tgtttgcctctctcctcttagcccaaacacacctcacctcgctccccgtcccgccgatctcttctcttagggtcgtccgcgatggcggctccggtggtggacgccgagtacctgcgccaggtcgacagggggcgccgcgctctccgcgccctcatcgcctccaagggatgcgcccccatcatgctccgcctcgcatggcatgatgctggcacgtatgatgtgaacacaagaactggtggtgcaaatggttcaattagatacgaggaagagtacacccatggttcaaatgctggcttaaaaattgctattgatctcctcgagcctattaaagcgaagcatccaaagattacatatgcagacctttatcagcttgctggagtagttgcagttgaagtcaccgggggtccaaccgttgagttcatccctggaagacgtgat

SEQ ID NO: 10369 - DNA, 372 bp, Triticum aestivum
  Clone ID: uC-tsrow189094g12b1
gcgggggctgttgtacctccaccgggactcgaggctccgcgtggtgcaccgcgacctcaaggccagcaacatcctcctggaccacgagatgaaccccaagatatccgacttcggcatggccaggatcttcggcggcgacaagaaccaggagaacaccaaccgcgtcgtcggcacactaggctacatgtcgccggagtacgcgatggagggcctgttctcggtgaggtccgacgtgtacagcttcggcatcctgatcctggagatcatcaccggccagaagaacagcagcttccacaacatggagggctcgctcaacatcgtaggctacgcgtggcagatgtggaactcggacaagggggagcagctgatcga

SEQ ID NO: 10370 - DNA, 339 bp, Triticum aestivum
  Clone ID: uC-tsrow189094h01b1
tgctacgcgtccggttttttcatatccaatttacctggtgcaaactgctatttactcgagaaggatattgatgtgcacaaatacattagctccatacaagtcttccaagggaatggagtgaatggtgtgctcagttagcttcaacaagtttgggtggatgccaagtggaaacagccgaactcgttgctccaaagactgccatcatttcttcaaccatccccggtgcagtatactgcggtctgttataagatatgattggacaaagtgcatcaggccagagaatgttcaacagaatcagattatgtttatgttattttgtcaaagtcattggacaactgc

SEQ ID NO: 10371 - DNA, 94 bp, Triticum aestivum
  Clone ID: uC-tsrow189094h03b1
tttgttagatcgagccgcccacctcgagaggccgcgataatttataccatccatccatccgctgccgcgaatataagcgcggccattggggcgc

SEQ ID NO: 10372 - DNA, 69 bp, Triticum aestivum
  Clone ID: uC-tsrow189094h04b1
ttgctacgcgttcggtcgtgtgcttcgagaccatgaacctgcacctcttcggtgaggacgcttaggggg

SEQ ID NO: 10373 - DNA, 70 bp, Triticum aestivum
  Clone ID: uC-tsrow189094h06b1
tttttcgcgtccgcggacctggggcgacgcgcatgccttaggaaaaagaaaaacttctccctggaggaaa

SEQ ID NO: 10374 - DNA, 348 bp, Triticum aestivum
  unsure (1)..(348): unsure at all n locations
  Clone ID: uC-tsrow189094h08b1
tgnctgctaattcctgccaccacccacgatttcccagcaccccgatctggcgcgcctccacccacctccgtcggccaccggcgtgccgcccaccccaagccaccggcgccacgcctccacccaccgccgccggccgcagcgccccgcagcccccactgccgcctgccgtcggcggggcctcccccaatccccacgcggcgcgtcctcccgagctactcgatgcgccgtcgtggtccgcctcaacctcccaccggcctcctcccgcgacgctgccgccggcctctcaatcgcgcgtgcccgccgcatccaccgaatcgagcgccgtcgcccgccccgaccacgcatgcc

SEQ ID NO: 10375 - DNA, 339 bp, Triticum aestivum
  Clone ID: uC-tsrow189094h09b1
tttcgactggccacatccaccccttcaccgagcttgccgttagcctcgccgtgtctagcccaaacgccaccgtagaagccatcatcgcagtcacgccggcgaacgttccgatcgtccagtccttgctggagcgccatagcgcagcaactgtcaagatagttacctatccgttcccaacggtggagggcctgcccaagggtgtcgagaaccttgggaaggcggacactcacgcagatgctatgcgcatcaacatcgccgcctcgaccgaacccctgatgcgccccgcgcacgagacgcatcgtcgggcgcagtctccagacgccatcatcaccgacatgc

SEQ ID NO: 10376 - DNA, 320 bp, Triticum aestivum
  Clone ID: uC-tsrow189094h11b1
tttctgctcggcggcggcgcgtagaacaggagaaggagcaggcggtggcggtgcccgaagaggagaagcacggcgacctagcccgagctcgcaaccatggctaggggtttgaagaagcatctgaagaggctcaatgccccgtctcactggatgcttgacaagcttggtggagcttttgcccccaagccatcatctggtcctcacaaggacagggagtgcctgcctctgatcctcatactgaggaacagactgaaatatgctctcacctaccgagaagtgcaatctatacttatgcagcgacatatcatggttgatggaaa

SEQ ID NO: 10377 - DNA, 123 bp, Triticum aestivum
  Clone ID: uC-tsrow189094h12b1
tctccgggccctgctcgtcaagaccatggaggcccacgccgacgtcgtgctcctagacccgaaggactactagctgatcacctgtgctgactagagatcaacggttgaaccatcttttgctga

SEQ ID NO: 10378 - DNA, 318 bp, Triticum aestivum
  Clone ID: uC-tsrow189099a02b1
tcgttcgtcgccaccggctctcccttcctgctcctcctctctccctccctccaccggcggcggctctcccctcctgctagccaccccaccccgcagcggcgtcgtcgtcggcggcaagatgccgaagaagagcaagaagagcaagagcaagcgggtcacgctcaaggcgaagcacaaggtgctgcgcaaggtcaaggagcaccaccgcacgaagcgcacggaggcgaggaaggagggcaagaccggccggagcaaggtcgagaaggaccccgggatccccaacgagtggcccttcaaggagcaagagctcaagaacct

SEQ ID NO: 10379 - DNA, 225 bp, Triticum aestivum
  Clone ID: uC-tsrow189099a03b1
tcgtacgccgcccgatccgacgcgccggcgacccgccgccgtgctcgagcgtcgctgatccgcggcgcagatcccgtacgaggtttgctcaccttatcagctcgagggtgcagggttgacgcgcctagccggctcttgaatttcagcgcacgcggatctggtgggaggagccccgtgggcgccgctgcctgggcgatgtcgagggtccgggacaggacggaggac

SEQ ID NO: 10380 - DNA, 226 bp, Triticum aestivum
  Clone ID: uC-tsrow189099a04b1
tcgtacgccgcccgatccgacgcgccggcgaccggccttcttgctcgagcggcgctgatccgcggggcacatcccgtacgaggttagctcaccttatcagctcgagggtgcacggttgacgcgcctagccggatcttgaatttcagcgcacgcggatctggtgggaggagccccgtgggcgccgctgcctgggccatgtctagggtccgggacaggacggaggact

SEQ ID NO: 10381 - DNA, 294 bp, Triticum aestivum
  Clone ID: uC-tsrow189099a05b1
tctaaacttaggtcgaaggcaccacgttttgaagcccattgcaaccagcaattggtgccggtacacatgtcctacttggggaaaatcagaacagtgcacccggagtacactgatgctaaagaaagcctcctgcaagctgctaggaaggcaccggctgcagatcttggctttaggattcagtgcaatcaatgggctctcatagaaaggctgcttcttggggagatcccacagaggactgcttacatgcacaaaggaatgaaagaagctttggcaccatattttgagcttacaaat

SEQ ID NO: 10382 - DNA, 230 bp, Triticum aestivum
  Clone ID: uC-tsrow189099a06b1
tggaacaccggcaccttcttcggcatccacgtcaccgtcgaccccttcacgctctcctactcccagctcaacctcgccgccggagacctcaagaagttctaccaggggcggagcgggcggcggacggcgagcgtgaacgtgaaggggaacaaggtgccgctgtacggcagcgggccgacgctgatggcgcagccggcggggggcaagggcggcgccggcaaggtgatccc

SEQ ID NO: 10383 - DNA, 413 bp, Triticum aestivum
  Clone ID: uC-tsrow189099a09b1
atcgcccacgcgtccgagaggcgaatcgcattcgctaccttgcttcctcctgacgtgccttggcctccccgcttcccgttcccaccgacgacaggagcgagcagaggaccgcgatgcagcagccgcagctgcaggcgccgccctcgtgggcgtccgggcccgaccccgcccgccctgctcccaccaccttcgacgaggcgtccatggagcggagcaagagctttgtcaaggcgctccaggagctcaagaacctgcgcccacagctttactccgccgcggagtactgcgagaagtcgtacctccacagcgagcagaagcatattgtgctggacaacttgaaagattatgctgttagggctctggtcaacgcggtcgaccaccttggcaccgttgcctacaaattgacagacctg

SEQ ID NO: 10384 - DNA, 212 bp, Triticum aestivum
  Clone ID: uC-tsrow189099a10b1
ttgttcgcccacgcgtacgagaggcgaatcgcgtgcgctactttgcttcctcctgacgtgcctcggcctccccgattcccgttcccaccgacgacaggagcgagcagaggaccgcgatgcagcatccgcagctgcaggcgccgccctcgagggcgtccgggcccgacctcgaccggcctgctcccaccaccttccacaaggcattcatggag

SEQ ID NO: 10385 - DNA, 276 bp, Triticum aestivum
  Clone ID: uC-tsrow189099a11b1
tgttcgcgactccggccagactcttcttctgtagaaagctagcgaggctcggaggtgagcgaaaatgccggtcagcaggatcgccgcggggagccaccgcgaggtgtacgaggtcggcgccctcaaggcggcgctcgccgagttcatctccacgctcatcttcgccttcgccggccagggctccggcatggccttcagcaagctgagccccgacggcgcggcgacccccgacagcctgatctcggcggcgatagcgcacgcctttcgcctgttcgt

SEQ ID NO: 10386 - DNA, 345 bp, Triticum aestivum
  Clone ID: uC-tsrow189099a12b1
ttgtcctagaaaccagagcagcggccggccgataacccctgttgcccgtctccctcgctccacgacgggccggcggatctgggactgggagacgcggctgcgctggcggcggtccgttggttggtggcggaccggcagagcctcagcgaccatcgattggaggcgaggggattgggggcgagcaatctacggcgaaagaaaacggagggacgatcggagcggcagagatcgatcgggggccagcagcagcacctcagatcagaagctgcgatccacaaaactaagaaaggcctgttgtgtttgtgcctccgccatgtctgaacatcaaggttgggcagatctacc

SEQ ID NO: 10387 - DNA, 345 bp, Triticum aestivum
  Clone ID: uC-tsrow189099b01b1
tggaacagatagtcttgaagttaggccatttatcatgcatggagtcaattcatctgtatttgttcctcggcatctatatgatgcattggatcggaaaactgtaagtaccggtaacttagctcaaccaccataccagcacccagatttgttgtcatcgagtcaacaaaatcaaggtacaaattttggaaatcaatctcagcctcatgatgtgccacagtttcatcctcattcccattcccatcctccggaggcatttagaagctttgcccccagcatgcctatagctcccccccaaaatccattccaaggacaaggaggtagtgcagcagtaccaccagttacacc

SEQ ID NO: 10388 - DNA, 267 bp, Triticum aestivum
  Clone ID: uC-tsrow189099b02b1
tggcacgcgtccgcgcaaactcgttgcacaagaatttctaccacccccaccgacttgccgccgccaccaccgccgcagctagatcagaagaaaaaaagagagagaagaactcgtcgggagggctcgagatctgtgtcgggagagagggaattcttgagatcggaatcggaacaagcgggcgcgctcgggatcagggttaccatacaattgttcccaggaacctttagtgaatgcgctaatggagtcaaagggtggcaaaaagtctag

SEQ ID NO: 10389 - DNA, 338 bp, Triticum aestivum
  Clone ID: uC-tsrow189099b04b1
ttctcacgcgtccgattccctttccccatctacagttaggagaggcgaccgagccggcgatttcgtttcctccggcgagccctgctctctttcctcctcccggtggcctttgtgctgctggaggtgggaggggggccggctcgccgggaggatccttgtacaggtaggctgcctaggtgtcggggtggcctacttggcgtcgtcctcggtcccggctgggtggcgatggtggcggggacacctgcgcctgggttctgcatctgctgctgcatcgcttcgtcggcttcgtcggtgtggacggttgcaggtcacgtgctttcgtgtgcgttggatcgagt

SEQ ID NO: 10390 - DNA, 430 bp, Triticum aestivum
  Clone ID: uC-tsrow189099b05b1
tcttcacttgggcatctttttcagttcagtcagtcagagttgccagtcaattggtcagtcagttggtcattcagtcagtcagtcaattcgcgcagtgcggtcagtctcagtctcagttcaaaggcgagttgcgcgtgcgttggatcgtcgacctagtgcttcagtcctggtgccaatcgcgcatcctttcgagctcgagccctcggacagccgtttgagcgtcggtttgacgaggtgctaggtgccagtcccatctgcctgcagcagcaccagcatcgcgccttccctcacaagccgcttcttagtgagctccacgtgcctcgactgccgcctggtccctttgcgcgatagcgtgccggcgcatgtgatcacgcctctcaactgagcaatctatcttcttcgcgtctttcaccacattgctgacggacgt

SEQ ID NO: 10391 - DNA, 262 bp, Triticum aestivum
  Clone ID: uC-tsrow189099b06b1
ctgtactaggcattgtgttcacctcagtcagtcagagttgccagtcaattggtcagtcagttgggcattcagtcagtcagtcaattcgcgcagtgcggtcagtctcagtctcagttcaaaggcgagttgcgcgtgcgtcggatcgtcgacctagtgcttcacctgctggtgccaatcgcgcatactttcgagctcgagccctcggacagccgtttgagcagctgcttgacgaggtgctaggtgccagtcccatctgtctgca

SEQ ID NO: 10392 - DNA, 136 bp, Triticum aestivum
  Clone ID: uC-tsrow189099b07b1
cccacgcgtccgcccacgcgtccgcccacgcgttcgcccacgcgtccggtcggttcttggtttgctgtggacatgtaatttaataccctggagatttatcatgaatgttcaattgtgttgtgccggaactagtcac

SEQ ID NO: 10393 - DNA, 220 bp, Triticum aestivum
  Clone ID: uC-tsrow189099b08b1
ccaaatccaatctcgagcccccctctcccgtccgtccgtcccaacccgatccgatctcccccctcctcctccgtcgccatgggccgcaagttcttcgtcggcggcaactggaaatgcaatggaactgtcgaacaggtagagagtatcgtcaatactctgaacgctggacagatcgcctctacggatgatgtcgaggttgtcgtcagcccgccctatgtct

SEQ ID NO: 10394 - DNA, 339 bp, Triticum aestivum
  Clone ID: uC-tsrow189099b09b1
tatcgggcggctggatggccaagatcttctgctgggtcgtcatcgtcttcctcatgttcttcgtccccaacggcgtcgtcagcttctacgaatcgatttccaagtttggatctggactgttccttctcgctcaggttgttcttctgttggacttcgtgcacggatggaatgagaactgggttgctaaagatgaacagttctggtacatggcactgctggttgtctcagttgcttgttatattggctcattcgctttctctggtctactctttcactggttcactccatcgggacaggactgcggactcaatatgttcttcattgtctccacactgattc

SEQ ID NO: 10395 - DNA, 384 bp, Triticum aestivum
  Clone ID: uC-tsrow189099b12b1
tcggccgccgcctcccctccgttcgttcttcttattcgggttgggtagtttacgtctacccaccagccatgggtaaggagaagactcacatcaacatcgtggtcattggccacgtcgactctggtaagtcgacgaccactggccacctgatctacaagcttggaggcattgacaagcgtgtcatcgagaggctcgagaaggaagccgctgaaatgaacaagaagtctttcaagtacgcctgggtgcttgacaagctcaaggccgagcgtgagagaggcatcaccatcgatattgctctctggaagttcgagaccaccaagtactactgcaccgtcattgatgcccctggtcaccgtgacttcatcatgaacatgatcaccggta

SEQ ID NO: 10396 - DNA, 262 bp, Triticum aestivum
  Clone ID: uC-tsrow189099c01b1
cctatgttaccggcaatggagtggaagtaggtgcctcactggagacagaggagcggggcaagagcgcagccacatttgagtgcaacatatgctttgagatgggcggcgagccggtggtcacttcttgtggccatctgttgtgctggccttgcttataccaatggcttaatgtttactccaaccacaaggaatgcccagtctgcaagggcgaagtgacggaggcgaatatcactcctatctatggtagagggaattcttgttc

SEQ ID NO: 10397 - DNA, 278 bp, Triticum aestivum
  Clone ID: uC-tsrow189099c02b1
tcttgcgcttcaaaacattaccaacaagcgagatgctaccaaggaatgaagttcttggtggatacatctttgtctgcaacaatgataccatgcaggaggatctcaagagacagctttttggcttgccagcaagatatcgtgattcagtccgagccatcactcctggtctacctcttttcctctacaactacacgacccatcagctacatggggtgtttgaggctgctagttttggaggatcaaacattgatcccaccgcttgggaagataagaagtgc

SEQ ID NO: 10398 - DNA, 202 bp, Triticum aestivum
  Clone ID: uC-tsrow189099c03b1
cctgatctcggctggcgataaccttcctccatgggtcgtaagcgccgccgcgcggaccatagcacgccggcgccacctacggccctccggactaaatcggctgagcggaaacccgtggtcggcttcggccacggcgccggcgccccctcctcctctgattggatgacctgctggaaggagatggcgaaagaagcacctggat

SEQ ID NO: 10399 - DNA, 414 bp, Triticum aestivum
  Clone ID: uC-tsrow189099c04b1
tcttttattacaacattcatagtcgagccatttgtgccacacgatcaagagtcttatctctcaattatgtcagacaggcttggttgcaccattagattctcagagtgtggtggtcttgagattgaggagaactgggacaaggttaagacaatctttgttccaacagagaagccaatgacacttgatgcatgcgctccattgattgccactcttcccttggaagtccgcacgaaaataggcgatttcattagagggtcattttctgttttccaagacttggatttctcatttatggagatgaacccattcaccctggtaaatggtgaaccataccctctcgacatgagaggtgaactggatgacacagctgctatcaagaactctaagaagtggggtgacattgaattccctcta

SEQ ID NO: 10400 - DNA, 299 bp, Triticum aestivum
  Clone ID: uC-tsrow189099c06b1
tctttatggcgctcagcaacgacttcgtgacgagggcggttttcggcggcaggttcgagcagcaggactagtacctcggtgagttgcacaaggcgtttgagctgctgggtgccttctgcctcgtcgacctctttccgtcgtccaggttggtcaggtggctgaccaacgacgagcgccgcatgaaaagaagctacaaccgcacccagcgcatcatcgccaaggtcatcgagggtcgcaaggccactagagctgccagcgtcagcgcttccggagcctatgaggaggacctgctggacgtg

SEQ ID NO: 10401 - DNA, 225 bp, Triticum aestivum
  Clone ID: uC-tsrow189099c07b1
ttttcgcccacgcgtccggctgccaccaagtcgattgagcgggaaatcaactccgtcaacgacaacccactcatcgacgtctcccgtggcaaagctatccatggtggcaacttccagggcacacccatcggtgtgtccatggacaacaccaggcttgccattgctgcgattggcaagctcatgtttgctcaattctcagagctggtgaacgacttctacaacaac

SEQ ID NO: 10402 - DNA, 365 bp, Triticum aestivum
  Clone ID: uC-tsrow189099c08b1
ggacgaggtggcggagcagggcgacggcttcgcggccttctgccggagggggaagggccggaagcgggtcgagatggaggaccgccacgtcgccgccgtcgcgctcggcggggaccgcgcgcaggccctcttcgccgtgttcgacggccacggagggaagagcgccgcggagttcgccgcggagaacatgccacggatcgtggcggaggagctggagaggtcggcgcgcggcggaggggcagggcgcgcggcggtggagggcgccgtgcggcgggcgtacctgcgcaccgacgaggagttctgctccacctcctccaagaaccgggagcaggcgggcggtggcgcctgctgcgtgacggcgctgc

SEQ ID NO: 10403 - DNA, 280 bp, Triticum aestivum
  Clone ID: uC-tsrow189099c09b1
tatcgcccacgcgtccgggagactagagcaccggcctcatgagcgccctgaagcactgtaggaaatgcgacaacatgctgtacccacaggaggacaaggagatgcacaccctcctctacgcttgctagaatcgacagcaccaggagatagctactgatactagtgtgtacaaaagggatcttgggaaatctgctgatgaacctaaagacaccctaaaagacgcaggtgctgacgcgtgtctgccacgcaccagaagtgttaaatgctacaactgaggcta

SEQ ID NO: 10404 - DNA, 441 bp, Triticum aestivum
  Clone ID: uC-tsrow189099c10b1
tttttcgcccacgcgtccgcccacgcgtccgtgtgaagtcgtctgtttcactgctgatgttggtcagggtgacattgaattggaaggattggagaaaaaggcaaaagctagcggtgcaagccagcttgttgtgaaggacttgacagaagaatttgttggtgaatatatatacccctgcttgcgtgctggtgcagtttacgaaagaaagtatctgcttgggacttccatggctaggcctgttattgctaaggcaatggttgatgttgccaaggaagttggcgcagatgcagttgctcatgggtgcactgggaagggcaatgatcaggttcgctttgagcttacattttatgccttaaatccggaacttaaagtggtggcaccctggagggagtgggatatcacaggacgtgaagatgcaattgagtatgcaaagaaacacaa

SEQ ID NO: 10405 - DNA, 399 bp, Triticum aestivum
  Clone ID: uC-tsrow189099c12b1
ttgttcgcttaaccataaccagttacaaggaaaaatgaccgacgtattttccaaccttggtagcttgacaacagtggatctctcctttaattctcttactggtgacctaccagaaggtttaagttcactgtcaagtgttaagactctatatttgcagaacaatcagttgaccggttctatcaatgtcctagctgatcttcccctttctgatctgaatgttgcaaataaccgcttcactggttggattcctagtcagcttaagaagataaatagtctacagactgatggtaattcttggactacgggaccagctccaccgccaccgccatttacagctccaccttcaaaccgtcggaagagcccagctaaaaaagacaatggttcatcatcttctgatgg

SEQ ID NO: 10406 - DNA, 305 bp, Triticum aestivum
  Clone ID: uC-tsrow189099d01b1
tcgtcatcgcgtccgcgacgacgtgcgccgcgagatccagatcatgcaccacctctccggccaccgcaacgtcgtcgccatcaagggcgcctacgaggaccagctctacgtgcacatcgtcatggagctctgcgccgggggcgagctcttcgaccgcatcatacagcgcggccactacagcgagcgcaaggccgccgagctcaccaggatcatcgtcggggtcgacgaggcctgccactcgctcggggtcatgcaccgggacctaaagcccgagaactttctgctcgccaacaaggacgacgacc

SEQ ID NO: 10407 - DNA, 154 bp, Triticum aestivum
  Clone ID: uC-tsrow189099d02b1
gcctcggacgcgtgggagcgactccgactccgagggggttgtggatctggcgccgtggccgccctcaaggaagcccgtccctttcgacctcgacctgaactgcccgccggcgggggagctctgatcgggcgccggagtctatgtagctgatatg

SEQ ID NO: 10408 - DNA, 191 bp, Triticum aestivum
  Clone ID: uC-tsrow189099d03b1
tgctgtgggccattcctccccctccccccttgcgcatccttatgtgttctcggatccggcgatgctcgaggcggaggtggttggccggcggtctcggtggcagtttgggtgcggatttactcaaagtctcggcctctggtgatcatcaaggtggtctggaggcagagcggcggctctggcggctggaggca

SEQ ID NO: 10409 - DNA, 437 bp, Triticum aestivum
  Clone ID: uC-tsrow189099d05b1
tctttcccgacgaatcacgcgcgcacattcacactgggcttggactcaccgctgctgctgccgcttccggagctaacaaacagcaacggaagctggttccggtggatcctcgccgccgccgccgtagccgcagctagcaagccgagcggaactggatccggcgcgggagcaggaaccgcgcgcgcgccggggctatctcgagggagaagaaatgtaagccgcagataccgtcgatcagctgaattacaggccatcttgagagctggatagtactgaaaatgggtgtatggagcttcaagaggaaagctctgatgtcggggctctggtctcagcaccatcaaggaacctgtcatcctcttcctccacatttgtttctgccaaccagtcacctttcttcacaccacggtcactgtctgcttgtcgcccggagcatgctc

SEQ ID NO: 10410 - DNA, 448 bp, Triticum aestivum
  Clone ID: uC-tsrow189099d06b1
tgctgacgcgtgggtcgtcgtccaacccctccgacctcacacccaacttttcctttccccatccctctgcgccctcgccgtccgcggatcaaccgatttcgcacgcaatgtctcagactgttgaactcagggttggcatgtcatgtgagggatgtgttggagctgttaagcgggttctcggcaaaatggaaggtgttgagtccttcgatgtagacatcaaggagcagaaggtcactgtgaagggtaatgtgacgccggatgctgttctgcagactgtttcgaagacaggcaagaagacatcgttctgggaggctgaaccctcggcatctgctgtttcgtcctaaaaaggcatctctaatatgtaaactgtgaagtttaatgtaacaatggcccagttgaaatgctttgcaaggacatgatcttctggtcggatggtatatgcaccatg

SEQ ID NO: 10411 - DNA, 247 bp, Triticum aestivum
  Clone ID: uC-tsrow189099d07b1
ttttcgctcgacggcgatcctcgagaggaagaagtcccccaaccgcctcgtggccgacgaggccaccaatgacgacaactccgtcgacgccctccaccccgacaccatggataggctgcagctcttccgcggcgacaccgtcctcctcaagggtaaaaagaggaaggacaccatctgcattggtcttgctgatgacacatgtgaggagccgaaggtcacaatgaacaaaactgtcaggaagaacttg

SEQ ID NO: 10412 - DNA, 351 bp, Triticum aestivum
  Clone ID: uC-tsrow189099d08b1
tttcgctccacggcgatcctcgagaggaagaagtcccccaaccgcctcgtggtcgacgaggccaccaatgacgacaactacgtcgacgccctccaccccgacaccatggataggctgcagctcttccgaggcgacaccgtcctcctcaagggtaaaaagaggaaggacaccatctgcattggtcttgctgatgacacatgtgaggagccgaaggtcacaatgaacaaaactgtcaggaagaacttgagagtgagactcggtgatgtggcgtctgctcatcaatgcccctatgtgaaatacgggaagcgggtgcacatacttcctattgatgacacagttgaagggattaca

SEQ ID NO: 10413 - DNA, 352 bp, Triticum aestivum
  Clone ID: uC-tsrow189099d09b1
tgcccgccgccgcctcctctcggctccttcttccttcgagtttcagccatgggtaaggagaagactcacatcaacatcgtggtcattggccatgtcgactccggcaagtcgaccaccactggccatctgatctacaagcttggaggtattgacaagcgtgtgatcgagaggttcgagaaggaagccgctgagatgaacaagcggtcgttcaagtacgcctgggtgcttgacaagctgaaggccgagcgtgagaggggtatcaccattgatattgccctgtggaagttcgagaccaccaagtactactgcaccgtcattgatgcccctggtcaccgtgacttcatcaagaaca

SEQ ID NO: 10414 - DNA, 367 bp, Triticum aestivum
  Clone ID: uC-tsrow189099d11b1
tgttcgagcaagcaccacccatggcggccatgtggtccttccgcctccttcccctcgcgctgctgctcgccatggcgcacgcgcggctgcagcccaccatccggctgccatcggacgacggctccgtcgggaccaggtgggccgtcctcgtcgccggctacagcggctactacaactaccgccaccaggcggatatttgccacgcctaccagatattgaagaagggtggtctcaaggatgagaacatcatcgtgttcatgtacgatgacattgcgcacaacctggagaacccgaggccgggcgtcatcatcaaccacccccagggtggagatgtctatgctggggtccctaaggactacactgggaa

SEQ ID NO: 10415 - DNA, 314 bp, Triticum aestivum
  Clone ID: uC-tsrow189099d12b1
tgttcgcccacgcgtccgatcatctcctctgcctaacaagctaagcagctgaactcaagcagcggcaatggagggcaaggaggaggacgtgcggctgggcgccaaccggtactcggagcggcagccgatcgggacggcggcgcatggcggcggcgcggacgacaaggactacaaggagccgccgccggcgccgctgttcgaggcggaggagctgacgtcgtggtccttctaccgcgcggggatcgccgagttcctggccaccttcctgttcctgtacatcagcgtgctcacggtgatgggcgtggtgggcaacc

SEQ ID NO: 10416 - DNA, 199 bp, Triticum aestivum
  Clone ID: uC-tsrow189099e02b1
tctccacgcgtccggaggatggggatgggcatgaaccctgggatgatgcggccttctcagatggggatggctcccggcggcatgcctggctccagctacaaccagatgggtgctggatatggcggccagcagccatacggcgggtacaggtgagattacacagcgggggatctaacagccagggtttgagaaaacagtt

SEQ ID NO: 10417 - DNA, 280 bp, Triticum aestivum
  Clone ID: uC-tsrow189099e03b1
tctcctactctctctcgggggagctgcatctccgtcaatcggcgcgtgtggtcggcggctcgccgccgccacggcagaggacgccttattcccccgccaccgcccctaccatcgtcaatacccggcaccacctacctgtatctacaagtgtctgacccccaccaccacacatccggaccgatatccgaaggcaaggggagagaacaggagctagagaggcgggggggcgatggcggcggtcggcgttctcgccctgcagggatcctacaacgagcacatg

SEQ ID NO: 10418 - DNA, 71 bp, Triticum aestivum
  Clone ID: uC-tsrow189099e05b1
actggctgacccaagaaacacaggagaggagagggggcaaaggatcgatcttgaccggccggcgaccatgg

SEQ ID NO: 10419 - DNA, 405 bp, Triticum aestivum
  Clone ID: uC-tsrow189099e06b1
actgccaccctcgccgtctcgccgccgtcaccaccgcatcttgataagagaaaaaaagagagagaagaactcgtcgggagggctcgagatctgtgttcggagaggggaattcttgaggtcggaatcggaacaagcgggcgcgctcgggatcggggttaccatacaatttttcccaggaacctttagtgaatgtgctaatggagtcaaagggtggcaaaaagtctagcagtagtagttccctgatgtacgaagctcccctcggctacagcattgaagacgttcgacctgctggaggcgccaagaagttctctgctgcatactcgaactgcgcgaagaagccatcctgatatcgattttggcatccccttcccgtagtttaggatttttatgcaattttattctgac

SEQ ID NO: 10420 - DNA, 317 bp, Triticum aestivum
  Clone ID: uC-tsrow189099e07b1
tttttcgacccatccatcatcatctcatctcctctgcctaacaggctaagcagctgagctcaagcagcggcaatggagggcaaggaggaggacgtgcgtctgggcgccaaccggtactcggagcggcagccgatcggaacggcagcgcagggcgcggacgacaaggactacaaggagccgccgccggcgccgctgttcgaggcggaggagctgacgtcgtggtccttctaccgcgcggggatcgccgagttcctggccacctttctgttcctgtacatcagcgtgctcacggtgatgggcgtggtgggcaacccctc

SEQ ID NO: 10421 - DNA, 176 bp, Triticum aestivum
  Clone ID: uC-tsrow189099e08b1
tttcgcacacatccatgatcatctgatctcctctgactaacacgctaagcagctgaactcaagcagaggcaatggagggcaaggaggaggacgcgcgtccgggcgccaaccggaactcggagcgggagcccatcggaacagaagcacaaggtgcagacgacaaggactacaaggag

SEQ ID NO: 10422 - DNA, 341 bp, Triticum aestivum
  Clone ID: uC-tsrow189099e09b1
tcggcagcagctagctaagctaagcctagccaaagcttctctagcttcggtagtccaggaaacatgaggctcgcggtggttctcctctgcgccctggtggccgtccaggtcgcgctcctcgccgccccggcggaggccggcgagctggtggtcgggtactacgacaagaaatgcaggggcgtggagaacgtcgtccagtggcacgtcaggagggcgctcaagaccaaccgccgcgccggtgccgccctcgtccgcctcctcttccacgactgcttcgtcaggggttgcgatgcctctgtgctccttgacgcgtcccccgagaaccctcacccggagaagga

SEQ ID NO: 10423 - DNA, 396 bp, Triticum aestivum
  Clone ID: uC-tsrow189099e11b1
tgttcgcggacgcgtggcggacgcgtggcgacaggctcggcgtccccaagcttccaggctgggttaatcgttttgccaatgctggcgatactgctgtggtggttgctgagaatacagcagttaaggcaggctaaaacagaaattgtcaatgctagtagagtagcatatagatttatggcaggcctgacttcgaaaaaccaggcttcccaagagtctcctggtgaacaaaatagaggcagccctactttccaaggaacatggttcaagaatgttgtttcagctggggcgaagccatctacaagtgggtcgactccctcacaagaagatgacgacaccccccccttgcagcgccaacaatcaacagagcaaccaacaaggttgtagccgctgtcacag

SEQ ID NO: 10424 - DNA, 72 bp, Triticum aestivum
  Clone ID: uC-tsrow189099e12b1
ttttcgattgaatgtgtgatgattttttcgtgtatgaacctattgtgaccttctgctagggtttgtgacgct

SEQ ID NO: 10425 - DNA, 262 bp, Triticum aestivum
  Clone ID: uC-tsrow189099f03b1
ttcttcacgcgttcgtcacgcgtccgctcaaggcgctatctagctggttgtagaatagaccgatcgagtagcatcgtaagaaacacctataaaccgatcatggcagcgcgcgccattgttgtcctctggctcatcctcgcgctggtcgccatcaccagcggaggagcgtcagcgcagctatcgtcgggcttctactcccgctcgtgcccgggcatgctcaaagccgtgcgctcggcgctgcacccggccatcgccagggagc

SEQ ID NO: 10426 - DNA, 398 bp, Triticum aestivum
  Clone ID: uC-tsrow189099f04b1
tcttgagcatctgcgagtgggaagcgtgttcaggtgggtttgcttctaatcatgacttcctgaataaccatttttccatgccttttgcattctaagcagtataattcagaataacggtttctgtttcctttagtgtaacatgggtgcaaagaatcatgccattatccttcctgatgctgatcgagatgccacattgaatgcccttattgctgccggttttggtgcagctgggcaaaggtgcatggcattgagcactgctgtttttgttggaggttcagaaccatggtagagttctacgatttctatccaagacaagttttttaggctaaagtttttttttggggtcagattttgaggaagcattgtcaaccttatcttttgttttagggaggatgaac

SEQ ID NO: 10427 - DNA, 360 bp, Triticum aestivum
  Clone ID: uC-tsrow189099f06b1
tgctgacgcgtgggttcagagctcaactgtgacatatggtggttcaaatggggcatgttatatgtcttcaacgactaggaggagtggtggagatggggtagttacaatggaagaaagtaaggaagcagacacaacaagtggtaaagcaactcacaggatcgcacgtggcattggcaataagggtcatgcactgactaggaaactgaactgcgatggaaaagttaacaccatgcaaactttgcagaacttgagtgaagatgagctagctgggtttgaggaatcatggcaaaggaatgcagggccttgtctgcctggttgggatcccagattaaacatgcttaacagtggaactcttagccc

SEQ ID NO: 10428 - DNA, 339 bp, Triticum aestivum
  Clone ID: uC-tsrow189099f07b1
tttgtcgccacgcgtccgcccacgcgtccgcgtcaaccgaaaaatccgccccatcttgaggtgctgggtcactgctgggctaagcaacacggccaaccacagcgcgaatcccccaaagaaaaaggcttcgtttcagaaatcaagaggttcacttgttgggttctcgctgtcggagttcggcggcggacggagacggagtcgtagtcggagcgagaggtctagctggtggctgcggaggcgaggcccggaggaagcggctgattgagtaagcgcgtctagcacaggaaccaagaggaggaagaggaacccaatccaatcatggactcggagcactggatc

SEQ ID NO: 10429 - DNA, 279 bp, Triticum aestivum
  Clone ID: uC-tsrow189099f08b1
cggacgcgtggggtcaagtccaacatgttcatcgtgggcgtgtcgcacaagatccgccggcagatcgaggacctggagcgcgccggaggtgtcgagcccggcaccctcaccgtcgacggcgtccccgtcgacagctacctcaccatgtttgtgtgggacgagggcaagtaccccgtcaacgccccgctcaaggagaccgtcgccagcatccagtcccaggtcgccaagatcgaggacgacatgaaggttagagttgctgaatacggtaatgttaagagc

SEQ ID NO: 10430 - DNA, 323 bp, Triticum aestivum
  unsure (1)..(323): unsure at all n locations
  Clone ID: uC-tsrow189099f10b1
ncgcagcccccaatcctcagatccgcctccgctccccttgcaagtccacccccccccccccctgcccaccgaggcgcgcacgcacgcacccggccaccgcccacccggatccagatccgcgcggcggcggcggcgcaggcgaaggcgaaggcgaaggagggagcgatggccggcggcgggggcgccggcggcttgtcggagtcggtgatgcggaaggtgctgctgccctactgctacggggcggtgtggatctaactctccttcgccgttatcgtctacaacaagtacatcctggaccccaagatgtacaactggcccttccc

SEQ ID NO: 10431 - DNA, 148 bp, Triticum aestivum
  Clone ID: uC-tsrow189099g04b1
acctcatgaacaagcgcaggaatatatccatccatgtacatttgcgagcataccttccttgccttcctccgagaggtccattgcaatccagaaaccttcaagtatgggcagatctgcaatttctcaggcccttccggtgcaccaggaa

SEQ ID NO: 10432 - DNA, 147 bp, Triticum aestivum
  Clone ID: uC-tsrow189099g05b1
acctggtgcccgcagcggcagaaagaggagagagcgcctttttttggtgcacgtcaacttctaccgcaactatggtaagacatccaagaaaccaaggcgtccttatgagaaggagcgtcttgatgcagaactaaagctggtcggtga

SEQ ID NO: 10433 - DNA, 334 bp, Triticum aestivum
  Clone ID: uC-tsrow189099g08b1
ttcgtcgatctcctcggttcagcccacagccaacgaacacactcgagcgcacgagtgagcgagcgagagagagaaagatggcgaatctgttcctgaagcaggcgaagcactacgcggcggcgcggccggactacccggcggagctcttccacttcatcgcgtccaagacggcccgccacgacctcgcgtgggacgtcggcaccggcagcggccaggccgcagtctcgctggcgaagctgtacaagaacgtggtgggcacggacacgagcgcgcagcagctgggctacgcgcgggagctccccaacgtgcgctacgcccacaccccggcggacct

SEQ ID NO: 10434 - DNA, 304 bp, Triticum aestivum
  Clone ID: uC-tsrow189099g10b1
ggcccgttcgtggagtacatcccgacgagggagttctaccacaggcacacccggtgcctctactgggaggggaagctcatcctgcccttcggcgaccagctctggttcaggttcctcttcggctggctgatgccccccaaggtgtccctgctcaaggccacccagggcgacgccatcaggaactactaccatgacaaccatgtcatccaggacatgctggtgcccctgtacaaggctggagacgccctcgagttcgcccaccacgagatggaggcgtacccgatgtggctgagccctcaccggc

SEQ ID NO: 10435 - DNA, 168 bp, Triticum aestivum
  Clone ID: uC-tsrow189099g11b1
tgcgtacgcccacgcgtccgcgataccaaagctcatcttttttttcttgaaatctctttggttccacagatctggaggatgtcttgcaactgcggatcaggctgcagctgcggttcacactgcaagtgcgggaagatgtaccctgatctgacggagcagggcagcgcc

SEQ ID NO: 10436 - DNA, 74 bp, Triticum aestivum
  Clone ID: uC-tsrow189099h05b1
atcgtccagaggcggggccgctctggacctgtggcgccgttttggcgtaatatagcttctgggctagatccggt

SEQ ID NO: 10437 - DNA, 311 bp, Triticum aestivum
  Clone ID: uC-tsrow189099h06b1
actgggcgacagcaacggccacgtcggcctcggcgtcaagtgcgccaaggaggtggccactgccatccgtggcgccatcatcctcgccaagctctctatcgtgcccgtcaggaggggctactgggggaacaagatcggcctgccccacaccgtgccctgcaaggtcaccggcaagtgcggctccgtcaccgtgcgcatggtgcccgcccccaggggttccggaatcgtcgccgcccgcgtccccaagaaggtcctgcagttcgccgggattgatgatgtcttcacttcctcgcgtggatccaccaagaccc

SEQ ID NO: 10438 - DNA, 254 bp, Triticum aestivum
  Clone ID: uC-tsrow189099h07b1
ttctgctttctacaagagctcgaccaatgacttgtttgagcattcggctgtcaagcacttctctgctgagggccagctcgagttcaaggctgtcctgcttgtgcccaagagggcccccttcgacctctttgacaacaagaagaaggccaacaacatcaagctgtatgtgcgccgtgtcttcatcatggataactgtgaggagttgatccctgagtacctgagctttgacaagggcattgatgattcagaggacc

SEQ ID NO: 10439 - DNA, 289 bp, Triticum aestivum
  Clone ID: uC-tsrow189099h08b1
gcgccggtggtggtccgtcctaccccacgcccggttggaccaccgatgtcgccccgttcctcggctgggtgcgctcgcgtgttccagccagccgtccgcgttgagggttttgactgcctcgacggtggccgtagcggccgtggccatggcatcgccgccatggtctagatgcacatacaacatcgaataaccaggaaatcttctcccctcagtagtgcaaaagcttggagggagagagatcagagtgaggagatgagtgagaggagcttaagttcaaaatttaacccct

SEQ ID NO: 10440 - DNA, 245 bp, Triticum aestivum
  Clone ID: uC-tsrow189099h10b1
ttatctatcgcacgcaggttccgagggttggcttgactatttttatgaatcttcaggtgccaacggcagtgtccaagatgatgaccatgacaagctgaggaggaacaagaaggaggctgtgtctatgatacatgagtacttcctttctgatgatataccagagcttattcgcacactcaaagaacttggtttaccagagttcaacccggtctttatcaagaaactgatcacaattgccatggacc

SEQ ID NO: 10441 - DNA, 262 bp, Triticum aestivum
  Clone ID: uC-tsrow189099h11b1
ccgacgcgtgggtccacgaagggcatccgtgttgctaggacgtacttggattccctccagcaacacaggaaaaagagtggactcatagatgatctgggtatcgaggatatgatgatggaagctctcgagaaagttgagaaggacattaagaagcctctgctgaggagcgacaagaagaacatgaatctcctattggcagattttgacaagataaacataaagctcggcattcggaaggaggatcttcccaagattgaggaaa

SEQ ID NO: 10442 - DNA, 474 bp, Triticum aestivum
  Clone ID: uC-tsrow189101a01b1
gattttcaaccgcaccgtttgcttcgtgccactgcgtaaatacatttcaatttgggatttttgctgattaaatacagcccgatgggaaaagttatccaacgcaaaattaccttgaaaacgccaatttaaatggcgcaacatatttaaattaaattccgccgttaccccttgggcatcgttataggcggcttctaaaatatcagcaggtttgcataaatccacccctaataaaaagtaatcccctgggtctaacgcttgacctacttgttcaaagaatacttgacaatcttcaggggaaaaattaccgagagaactgcctaaaaatgccatcaaacgatggggataattatgatcgggcaatgatgccaacgccaactgataagtacttactaaaccttgcaccgttaagtggagataggtagctaaaatagcctccgcattttctcttaaaatcgcttcactgatatcaacggg

SEQ ID NO: 10443 - DNA, 529 bp, Triticum aestivum
  Clone ID: uC-tsrow189101a06b1
agtggtttatgtttttctgaaatagagatttaaattttgtctaaatccaagttatgtcaatgaaaaaataaaggatttcagacagttcttagttagcttttttggcactctcggtttaaagtgtaatcaagctatcattcggtgtgaattatgattcaaactaagagtattgaccatcatcaacaagtgggaggtagcagtcatcattaggggcaaaatattcttgcccttgattagattctctataatcagcatataatcgagcgtcttcttcttgatagtctgacattaagtatttttcatatagaccatcgaatactttgggtgaaatataaatattggtctttcttaactctctaaggcgttctcggcatacattgaattcactttctatggtcaccattagtttgttttcacagagctccttgatatattcatcactttttttctttacatacaaaaattttatgctttcttcgattgaatgcatttggtgaaataaacttgccatgctattcattatatacat

SEQ ID NO: 10444 - DNA, 521 bp, Triticum aestivum
  Clone ID: uC-tsrow189101a07b1
ctattttttggtgatgacgaagatgagctagaggaagaaccttctccccccactacaccaatgactgggtcatggcaatctcagcccgagcagcaagtgtccccaatcctagaacaaaccaccgtagaggctgaaacggtggaatcgcctccttccctggaggatgtttttggcgggttgaccgccgatgaactggggaaagaatccctttctcccgtggctgaggtggattttgtcgatgcttccctagaaacgttatctctggtgcaggcggtagaggaagcctttgattccttgccccccttagcaacgaccccagcgaccattccccaggctgaagtagaggcagtggcagctccggctcctcccgtggaacgcacccatgaacggcgggccatgcccagggagcaaaatccagctaatctttccatccgggtggattttcaacggttggagcggatgaataattgggtgggggaattggccattaatcgcaatagcctgtctttacaaaatcagca

SEQ ID NO: 10445 - DNA, 426 bp, Triticum aestivum
  Clone ID: uC-tsrow189101a09b1
cgccaatggcaatgcagttagtctgggggccccgccgatgaaaccggggacagctactaaacccattgccagtggtggtggtagctctggccctagtctgggctccggccaacccagagcagaacggcccggtggcggcaatgcaggggcaaatgttggtcccattgcggccaatcccgttgctagtagtgctccccctaaaccgaaaccaactcccagttcccccgctaagccagaccccttaaagtgcgttagccaatgtaaacccagttatccctccatcctccagggggaagaaggtagtgctacagtattaatttcagtaaatgatagtggtggtgtgaccagcgtaaccatcaccaatgcccacggcaacagcgaggtcaaccgccaggccctattggcagccagaaaaatgcagtttac

SEQ ID NO: 10446 - DNA, 477 bp, Triticum aestivum
  Clone ID: uC-tsrow189101a10b1
agcccagaacccgttagtgatagcttcccaatggattacgaaggcgaaggcttaccagagcaaccagaaccatggtccactggcggcctaggggatagggatgaatgggagctggccccaccggccggggaagcttgttatcggcaaccggagctggaagggctactccattccctttattccgctcggtcagtgttggtgacatcgggggaaggcatgggcaaaacctatctggtgcggcaggtgtgggaacgactgttatccgatggggtgacgtgccaatactttgaaccagctacccccaaaaccctcctgatggcgatggcttagtattagcaacggaaaaaatttggtcgttaaggctgaaagctttatccagtaatgcttccagacatcaaattttataatttatctgaatcattactgtcccattcatgactataagtaggacaacttcaccgcctaattaccggaaaa

SEQ ID NO: 10447 - DNA, 183 bp, Triticum aestivum
  Clone ID: uC-tsrow189101a11b1
gggggcatggtcggggtgacaaatcctccggcattgcggatgggggcaaaggcaatggctgactgttccaggcggagcatagtggggtcatcaatggtgagctggccactgataaaagtcatggggttgatgtaaccctccaggcgatcgggcggttcatcgtcgaggtaaatggtttcggta

SEQ ID NO: 10448 - DNA, 440 bp, Triticum aestivum
  Clone ID: uC-tsrow189101a12b1
gttttctaaatggttaaccaattgggttccggtggttaaactgttgtagtcgttaaaatcctctgtgagagcctgccgttgtaattttttttgctgttgcaatgcttgcactaatagttgcaaacggttagtgttaggaatgcgtcttttgcctagcaccatttgtcctaaatctaagcaaacttcccccagagcattaaacgcatcttccattaggatttccactgtttgtaattggggtagattgtggaaattaacaatttcattgagcaacattaggcatttatttaatctttccgtatgctcgattaaaactaataataattcccttaatttactttgtccccataatcctcgctggctggccaccagagtttgccgagatttaagcaagttttgacgcagtttgaccaccaattgctgagcttgggggtcatcgg

SEQ ID NO: 10449 - DNA, 153 bp, Triticum aestivum
  Clone ID: uC-tsrow189101b01b1
aaagttgggggctaaaaactggaagcaaatcggtctaactcttggaggtgcaatcatcgggggaataatcacctacctagcaaggaatgccaacccttaagaataggttttatttcattggccttgattgctaaatatgttcacacaacagcg

SEQ ID NO: 10450 - DNA, 449 bp, Triticum aestivum
  Clone ID: uC-tsrow189101b02b1
gtttggcctatcccaccaccatccccgcttcaattttgacgaggctgtgttgccagtgggggtagagctatttgtccgttgcgtggaaaggttctgcaatgcctagaagctgaaggtggtacgaattacccccattaccagggtgccattggcgttgttgtagtccgcattgggtaccaccacaataccgggggtaatggaaagattgtcactcactgcccactggaaaaagccttctaggtgcaaggaactgtcaatgtcagtggtggcaatgtcatcggggaagacaatggaactactgctcacccagggttgcatacccacaataatccccgccatattcccttccttgataatgtcggggaaagccagggtcacagcccaattccaaatatctaaacttcctctaccaatgctggcatccgccagatctatagatttgagggtgc

SEQ ID NO: 10451 - DNA, 450 bp, Triticum aestivum
  Clone ID: uC-tsrow189101b04b1
acaaaccctatatataggcaaatttgctggcattttaatagtaatttcagttccctttctccccaatggtttggagcttctagtcaagctaaaaaagtaaaaactctaactctccaaagtttaattgaccaagaaaaaattgacaaaatcacctgtctaaaactagatattgaaggttgggaatgggctgtaattaaacagctagaaaatatagaatcctatttactgcctgcggtagtgatgtttgaatatggcggcggcgtcaaccgaggtcaaaaccaaaagggttgggccccagaattctttgaaaatacattaaacattcttaaatcattaaaaactcttggctacggctccggaattttattggattttgctccagattgccaagaaataacctttgatttaagccaattgcaaacatctgagttggataaacttttcccccct

SEQ ID NO: 10452 - DNA, 495 bp, Triticum aestivum
  Clone ID: uC-tsrow189101b06b1
gggcactttttgcgcccccaatcggaggcggtgaaccaagcatcgtggttaccaaataccgttgccttgggaatgggtaaggaggcaatcaagctgaccaccggcaatgattcgttgccaaaatcccccacaaatagtgccaagtctacgccgatcgcctggagagcttggtggtccgccaattcccattgttcatggatatcccccacaacggccagggtagtggttgcggtaggttggggggccatcagctctcttcgctttccgacatttctgccaattcttcttccccagaaggaggcactagggccacagcggcgatcgcatcatcggcatctaacctttgtacccgcaccccagtggcactacgggattggggggaaatatcgttcacggactggcggataataatgccccggttggtgacaatcatcaactcgtcatcggcgttgaccacatggagggccactagctggtcatctttggatttaaagc

SEQ ID NO: 10453 - DNA, 477 bp, Triticum aestivum
  Clone ID: uC-tsrow189101b07b1
tacgaaaagtggattgttaccatcaagtttatcgtttggttggcaatgatggcggtattgagcaactattacgacgggcggaagaagatataactaaagccttggttaatgaagctcgaacggaatgtgatcgttatgtgcgggaaagtccccgattttatgatgaaggtactttttccatttatcaattccggcaaactctccagcaaacttcccagggttatgatgcccaggcgatcgtggaagcggaaccagctattaaggagttgctaaaactagattttgaacctaaagttttcaatactgtacggaaaaatttccgacaaaccgtcaataataccctaaaaacccatctgctaccaatggcagaagaacaagcccaaataattttagaacagtatgatgtggcaaggaaatatcgtgagcaaacgttggaacaggatgccgaagaaaaaattgctcgcaattcccgtttac

SEQ ID NO: 10454 - DNA, 296 bp, Triticum aestivum
  Clone ID: uC-tsrow189101b08b1
ttcctggccacggaggacattcaacagttggctagtttataccgggctacttccgccgacctggcccgtgcccaaacccataatctcaatccccgcctgaggcaaaacttacaagctttaatcactagggcctacagccagatttaccaaggcgatcgccgacaggaatggggcaaagtaaaagaattttacctgtggcagttgccgttagtgttgcgacaaacggggatttacaccatggcggcctttggtattttttgcttcgccagtgccattgcctggtggtatagctggcg

SEQ ID NO: 10455 - DNA, 428 bp, Triticum aestivum
  Clone ID: uC-tsrow189101b09b1
attgccgtagagtacggaagccggccctttgaggacttctatccgttgtagatttgccgtgtccggaatagaaaaattatctctgaacttaaagccgtcccggagagttccgccaaattgttgaaaaccgcgaatattaaatatttcggatgtaccaccaacagtatttcctctctgcacaccactgacattttgcagtgcttccgaagcacgaattatttgcctgtcctccaacacctgttggggtaccacttgaatcgattggggaatgtcccgtaagggagtatcggttagagtcgccgttgtggcatcgtccaccgcatagccttcatcctgttcaccggtcaccactacctggatagcatcattgccatcctcttcatctgccacccctttccctggacttaaccccagtaccagggattggt

SEQ ID NO: 10456 - DNA, 434 bp, Triticum aestivum
  Clone ID: uC-tsrow189101c01b1
tttaaaaaatatcttcgatattggtcgtctggctttttgccacagccagcaatctttgtaaaaaatgaaatggcagaccaatgttttccactaagtgtagagctatactacgccatggattttcaattttttctaagagtcttaaatcaagaacctaagtcagtttggattcaagaaaaactaactcgactcagatggcatgaggacagtaaaaccatgggaacaatatcacgaatagactttcatgcaatagtgccagaaccggaggtgcataaagtagctctagcagaagctgaaaatttaccaacttggctggaaaaaatattttttcgaatccaagcatttgattatctctctctccaaccttatataaattccttggacaattttcattggttacaaattactaaaaccattgttaaaagacctaccct

SEQ ID NO: 10457 - DNA, 441 bp, Triticum aestivum
  Clone ID: uC-tsrow189101c02b1
gggacgtgcatctagaccaaacccgttctatttaccattggctccaccaacgcttacggaaattattacccccaccccaatgccaatttttaaccgatagtgaacccctcgggcgatcgctccaggattatttgggccaaccattcaccgtgatgcccattccccacacggattttgctgaagttgtacctttatttacagaagctgatcccattctttgctggtggcccggtgcccctcgggaagaaaaaggttggtcggtgatgcgtcatttggtttcattgccccggcctaattcacctaggctccaactaattgcggcggcggcttccggattaaaaagtgacagggaaggaattgaagttcatttaattggcgatcgcctgactagggaagaatacgccggttggttaaataaagcccaaattattctcttaccct

SEQ ID NO: 10458 - DNA, 500 bp, Triticum aestivum
  Clone ID: uC-tsrow189101c03b1
tgccaacatggaatcggtttctgcattcacggcaacccgattaatgcctccctcggcttgaaactcgtcaccgtgacccacatgggctgttacgagattgggagttcctagggtcaaacccagtgccagaaaggaacttgctaattgaattgttttcatcacaccacctcaaattgggaatttgtccaagattttcccagtctgccaaagggggtatgaaattcaggtgaaaatctccttcccccgctaagatcagaccgttataaaaaaggcagaggcgatgcgaattttgctggtggaagatgagacggatttgggaatggctattaagaaagtgctagttagtgaaaagtatgtggtggattgggtgacggatggctcccaagcttgggattatttggaaaatcaatggacggaatacacccttgccattgtggattggttactgccgggattatcgggtttggaactctgtcaaaaactgagaacccagggtaatt

SEQ ID NO: 10459 - DNA, 408 bp, Triticum aestivum
  Clone ID: uC-tsrow189101c04b1
cgatcgccaagggttgctaactgcaatcccaaaccgggcaagatcgctccccccaccagttttttatcttggtcaaaccctgtaatggtcaaagcagtgcctccatcaaccactagacagggaaagccgtaggtcagccccgtccctaaaccagccagggcccggtcaatgccaaagctggggtaaagattgaccaggggaagattcttcagggtcaaaattttaggctgatatactcgccaaacttcggtttgttccggtaccaccgatgccaacatcagaggaactttccccaacaaaaccggcaactgagctgacttggggttgtaatctgtaacccaggtttgcaggggagcattgccgctacaatatgcccagtgcagacgggagttgcctatcattaggcct

SEQ ID NO: 10460 - DNA, 395 bp, Triticum aestivum
  Clone ID: uC-tsrow189101c05b1
tgcctactgtgatttgagcagcgtcgtattgccccagggttgccaaaccaagcactgttgctcctagtccaaggatgctgttaacgctcagatggcgaaccgcaggagagaagaaaccgttgttggtgggggcagattgaaccaagaacttatcttcaccacgagtgaaatcggtaatcacgtcaaccttggacaaattaacgttgaaccaggagaggccgagctgggaatccttaagattggtgtagtcaaataggtcattacccataccaccagtcaaaatatccttatcggcaccaccgataatcagatcattgccagcacggccattcaaagtgtcattgccgtgaccgcccatcaaagtgtcatttttttggaagccaactatgctgtca

SEQ ID NO: 10461 - DNA, 413 bp, Triticum aestivum
  Clone ID: uC-tsrow189101c06b1
ctggggcttgttgttgaggagattgagaattttatcgccccgttccaaagagcggtcttctaaaaaggaaacttctggggtgcgccgtaaacgcatccgttgccccagttctcgacggacaaagggagcggcggagtgcagtccagccatggtggaggctttggcttcaggggagccgtaaatgctaacgaaaattttggcgtgctgtaggtcgccggaaacttccacttccgtgacgctaaccatgcctgtgcccacccggtcatctttgatttcgtggagaagcatttgactgacctcccgcttaattagggacgacacccgggaaactcgacgactggtagccatagacctgctcctcggcaacaaaaaagtccgagcctggacagattagcccaaactccctctacacg

SEQ ID NO: 10462 - DNA, 263 bp, Triticum aestivum
  Clone ID: uC-tsrow189101c08b1
tgccgattgtttgcaccatgcccaagcggcgatcgtcatggtcggtaccgacacagaacagtttgtcgggttggggaaaccagagcttagttttcccggacaaggcccccaatacaatccgtattttgtgcgccggcaaacctggcttttgggagaatccttaatgttgttgaatagtcctgaccaaactggggaggctctacaacaggtacttcatgatgttgagcgactagaggcgatcgtctgtaatggccgacaaaggc

SEQ ID NO: 10463 - DNA, 494 bp, Triticum aestivum
  Clone ID: uC-tsrow189101c09b1
cctccggttatcacttggacgtcggagaccgcggtgattcatggtatgccccccgattactccccccccgatgtgggcacggcagttcagttttatgcgcccgaatttcgtgaattcatcatggaagtttttgaacgttgtgttcagcagggcgagccttttgatgttatctgccaacttcaagtgcctgacggacgcagaccttggatacgggccattggcgaggccgaacgggacgcccaaggtaaggtaattgttgtccagggggcgtttcaggatatttcaaccctacgggaggcccaagagcgtttccagttaatatccaaagccgccaatgatgtgatctgggactggaattttgctaccaatcaagtctggtggaatgactccataacagatctgtttggctatgctttgttagatatggagccgggactagaatcctggacgctacgcattcacccggatgacaaagagcgtgttctccacagtat

SEQ ID NO: 10464 - DNA, 315 bp, Triticum aestivum
  Clone ID: uC-tsrow189101c10b1
ccttttgaccgtatgattattgcccaggctcagcaacataatttttccgtcattagcaaagacgaaaatttcaaaaaatacaacgttaatttaatctgggaatgagaacaataacctgtttgtatgagtcattttcattccttgaaccttattgcttagaacgtgtttagcagttttgttcagccccctaaatctcttcactaaagctccggcaatactgggggactttcactcagtttccccccaaattggaggccaggaggacatttaaaacaggctcttaaatgcctttaacaattgccccgaagtctccga

SEQ ID NO: 10465 - DNA, 527 bp, Triticum aestivum
  Clone ID: uC-tsrow189101c11b1
ctttaaataagagccgtccgtaaatctgagttaatttttggtgcacatttggacacattactccaagaagtgaatgacatttaccaaaatgatgccgagctaacaaagttgctgggttctctgtatcaacaaacccaagattatgcgacagagtttggtgctttatctggtggtaagaagaaggcaaagtcttaggttgttgaatgtttgttgagggttatggctagtacttgatggcgtaagttcatcaattatttagaggttttaagatatcagatatcaataactgggtaatgaatttatgccaagctctactagtgcgtagctctctttttttttctttttaggtaaacttatgacaaaaatttatcgctgtaaattaactctccatgacaatgttttttttgccagtcgagagatgggaattctctatgaaacagaaaagtatttccataattgggcattaagttatgctttttttaaaggaacaattattccccatccttatggcttagtcggacagaatg

SEQ ID NO: 10466 - DNA, 394 bp, Triticum aestivum
  Clone ID: uC-tsrow189101c12b1
tttactccactggtcatgctccttgtgatgacgtttatgtctattatttggatgctccattgaccaaaaaagtctctgctaatgaatgcggtattgtgcaaatttcccttggctcaataccccatactggttcaacagaagtaacgttgataggggtggggccagcaacggtgagctcctttcctttaatggctaaagcagatgcaccaaaatgttccaatggtgtggcgaccaacattcctgcggagggaaaagcacgatatgttcccaatgcggaaacgggtaatcaatctttagtgtggacggggcaaacccctttcacccagtacgacatcacgtttcccataccaaaggaaagaaagctgaaatccaatgcttgcggtgttgccaccat

SEQ ID NO: 10467 - DNA, 338 bp, Triticum aestivum
  Clone ID: uC-tsrow189101d01b1
aattgagatgacgaagatggaggtttgactttaaactgaggctaaccgctaatagcgtatcggaaaatcttcaagatcccaaggaaagatttttatgtcagtgaacagcatccatttggtgggaagggccggccgtgaccctgaagttaaatattttgagtccggtaatgtagtttgtaacttcaccctggcggtgaatcgacgcacaagcaaaaaggatgaaccccccgattggtttgacctggaaatttggggtaaaactgctgaaatagccggtaactacgtcaaaaaaggcagtttgattggtatccaaggatcgttaaagtttgaccattggg

SEQ ID NO: 10468 - DNA, 450 bp, Triticum aestivum
  Clone ID: uC-tsrow189101d02b1
aatcccatcgcccatgcggaaatgttagccatccaaactgcttgccgtcggctaggccattggcgattgaatgaatgcaccctttacgttacgttggaaccttgtcccatgtgtaccggcgccattatccaagcccgtttaggtttattagtttatggcacccccgacccgaaaaccggcaccatcgacagcgtgttcgatttggccgccagcgctgcctctaaccatcacttacaaagcttaggaggagtgtgccaagaacagtgccgtgaacagttacaggattggtttgcccaacatcgggctaggaaaaaacaacaatcccttgtttcctgaaggttggtattaccccgttgggactttgcaactacagcctttgatgggtatgggaatgttgcttaacgttatcttcagctttaaccactttgctgtcgttgagaatgcgttttt

SEQ ID NO: 10469 - DNA, 427 bp, Triticum aestivum
  Clone ID: uC-tsrow189101d04b1
cccggtgcggaaatccctattgccaaaccacttcccggctttggggtttgcccctcctacgcctggatatggggcgggtctacgacggttccatggtggggcgatcggaagctaatctccgcaacgccttgaaaaccgccgagtccatttctccagctattttgttcattgatgaattggacaaagcctttgccgggggagccggttccggggattccgacggcggtacctccagccgcatctttggtagtttcctcacctggatgcaggaaaaaacttcccctgtattcgttatggctacggccaaccgggtcgatcgcctgccaggggaatttctccgcaagggacggtttgatgagatttttttcgttgacctaccttcttccgaagagcgggaagccattttccgcattcacctccataaacg

SEQ ID NO: 10470 - DNA, 461 bp, Triticum aestivum
  Clone ID: uC-tsrow189101d07b1
atgctcccagatctgtcttgggcaggacttttccataggttgcatggaatttaatcaatggtaagtgattatactcacaattattccagtgatttttgatatttattctgaacagataatgctaacttaatagttgagaattatttgcagttttgggaaaaccatgacgttattggatttatcggtgggtcagttggcttttgtggagaaaattttactaggaaaccacggtcaggggttagttaatcgcctagaagcaatgggaataattcctgataaaccaattcaattgctccgcaaggctggtttggggggaccactccacctccgcattggtagcaccaccgaagtggccatgcgccgtagtgaagcccaattggtgcagattaccttaggagagtagggcggagatggtgagtcattgccaaagggggtcagtccagtccagtcgtccagatgtg

SEQ ID NO: 10471 - DNA, 498 bp, Triticum aestivum
  Clone ID: uC-tsrow189101d08b1
tttcttaatctctggtcgggctggggtatcaacgacgatgtgctcataattacgggccgcttttaatccttcccgctcatcaacaactgggaaatctagcttttcatgggatgcccaaagcagtgccgaacggttcaagtccccatcaatcaggattgttggagctttgttattgaggtaggcggccaggtgaatagagcttgtggttttacctaccccacctttaaaagcagtaacggtgataatcattagatggttaaatatttaaaagtttagacgtttaactgtgtaaactttcgaatggctaaaaggggagacgcttggaagtttaaaatgttgctaagatttttggcagcaatgtgcaataaaaattactaggggttaatgagtctgattgtgaggagcttgtcgaagttcgattcagacagagtgccaaagtttttattaggggtttcaagtgatgactaaaaaaatactaggggtttgggatgaaagata

SEQ ID NO: 10472 - DNA, 403 bp, Triticum aestivum
  Clone ID: uC-tsrow189101d12b1
tgtagtaaatttaaccgcattagctagaatgttaaccaatacctgtcgcacccgtgttaaatcccccaatatcgccataggtacctggggctcgatttgataaaccaaatccaatttttttgcaaaggcttggggcgcaactaaatccaggcattcttcgacacattgctgaatttcaaagggatggatttctaacttaaattgtcccgactcaattttagaaaagtcaagaatatcgttaattaaactaagtaaggcttcgccactactgcggatggtttcggtaaattgttgctgttgggtatttagatgcgtatctagcaataacccggtcatgccaatcactgcattcatgggggtgcgaatttcgtgactcatggtggccagaaaatcacttttggct

SEQ ID NO: 10473 - DNA, 390 bp, Triticum aestivum
  Clone ID: uC-tsrow189101e01b1
ccggtattgggagatttagggggcaaattaaaacttggcaaacaggctctaggaaaaggcaataggtatggtggaaggtttttcacgtcgttcagaattcactctggcccggggaggggatattacccaagggaattccctcaccaatggtttggactggggctttaaacagttgacccgtctctgttccctcggagtagtggtgattctcggctggatcgcctgggtggtttttaccgatgcccgaccggcgatcgccaagtttggttgggaattcatcgtcagtcaacaatgggacagcagtgggcaactgtttggcggcttaccctatattttcggctcggtggttagttccttcatcgccctaatttttgccctgcccttggggct

SEQ ID NO: 10474 - DNA, 374 bp, Triticum aestivum
  Clone ID: uC-tsrow189101e02b1
tttggggggattgtttacctccaccgctttaactctactggtattaccagctttatatgctcaatttggacggtttttacgtccatcggctagcgttactactccagcatcaacccccattaatgttctgacaaaagtttaaattttaatttatttatgaagttctcaatccccaccaatcctgttatccttctactcatagtttttctgctcaatgcctgtggtaatcaaacttcgccaacagatatttccgttagtccgaccccgactcctaccgtttctcctacagaaaatgttgaggagaataaaactgaatcccatggaggccagggaggacaggtaattgaaatgggggattaccatttagaattact

SEQ ID NO: 10475 - DNA, 484 bp, Triticum aestivum
  Clone ID: uC-tsrow189101e03b1
cctccacacccccaaggatgctgccattattcaggccatgctgctgttgggcaatggttttaatttaaacattattgctgaaggtatagaggaggagccccaagctcgttgtctctacgatttaggttgccgagaaatgcaaggttattggtttagtcatcccctttcagaagcagaaattacggctttcctagcagaaggcaatttccaaagattttgcctcggttagggagctttttcgacgaatttagtatagctaagttcattgattgcattccaactaaacatttgactgcggaatgtttgccattgttgataaatttccttaaattgggcatctttactggcaaattctgctagcaatgctcgggaagtttcctgggccactgttaaaatttctggagaaaaggatttcagaattgtgcctccatccagtaatgttttcagggcaatgctattaaaagtttcataacgggatagcatc

SEQ ID NO: 10476 - DNA, 461 bp, Triticum aestivum
  Clone ID: uC-tsrow189101e04b1
gcgtaattatttcgggtcttgaaaagcccgttcatagacataataaactaccgttttggaagcgttttgggggccgccctgggtcatgatatacacctcttcaaaaactttgagggcggaaatggaagataaaactcctactaagaaacaatagggccgcatgaggggaatggtaatatcccaatgttgtcgccaaccgtccgctccgtcgatcgccccggcttcatagagttcctggggaatggcttggagtccggccaggtaaatgaccatgtaataacccaaccctttccacactgtcaccaccatcacactccacagggctaaattgggactggtgagccaaggaataccatcgctaaatcccagtagggcaagaatttgattcaggatgccattggaagcgtagagggctttccaggcaatgcctgccaccacaatagaggtaattaccggagtgt

SEQ ID NO: 10477 - DNA, 494 bp, Triticum aestivum
  Clone ID: uC-tsrow189101e05b1
cggtaattagttccggcaacaccttaccgaccgctgcgaatattaccctgcccactgccggttccaccgagagtcaggggggaacgccccagcccgatctggaagcttttgaagggatgttggtgaaattcactgataccctgacgattacggaaatgtttaatctcgatcgctttaatgaaatcaaactcagccaaggcggtcgtccccaacaattcacccagtttaatgatgctaatgtggcaggctatggggcataccgagaggaaatcggtgctcgcaccattacctacgatgatggcctgagtgtgcagaacgcagaaattagcaatctggatggttttggttccagcttcagcaccgctagtgatattcgcatgggcgacacaatcaataacctcactggcgttctcagctaccagtgggcaggtaacgcttccagtggagctacttggcgggtgcgctctgctgtagatgggacaaatcagtttact

SEQ ID NO: 10478 - DNA, 491 bp, Triticum aestivum
  Clone ID: uC-tsrow189101e06b1
attttcattcccaccgctgacattttgcgagaattggcccagtttgccccctgggaggtggatgtaattaccctaagcggcagcggagagccgacgttagccaaaaatttaggggaaattctcgaaggcattaaaaagttgactgggaaattaaccctggtactcaccaatgcgactttgttaaatgatgctcaggtaagagaagagctctccttagcagacaagatttctgtcaaattagacggattgtggccagaccagttacaaagaattaaccgaccgatcgccggcattgagttggagcaaattttgactggtattcaaacctttcagcaggagtttacaggggaattatcagtgcaaaccatggtgctgcagccctgggaccagacaactgagaaccgttatttggagcttttatccctaattaagcccaccgaagtgcaactcaacaggcccaccaggcccaaacccctccagcgggaattgga

SEQ ID NO: 10479 - DNA, 357 bp, Triticum aestivum
  Clone ID: uC-tsrow189101e07b1
tgatgacctccgttatttttgtcggttgaggtttgtgaccttggttcccattctagtttgcatccccaataaagacaatatagtattttaagcacagattgcatccaaaatagggacaataggaatatcaatggacaaacttgaaagtatttacgcctttacccaagttgtgcgggagggcagttttgcggcggcggcgcggaaaatgaatctggggcgatcaacggtgaataagatggtgattgccctagaaaatgagcttaaagtacagcttctccaccgcagtacccgtaaagtgacccccacccccacagggatagccttttatgaaaaatcggtgcaaattttggcagattt

SEQ ID NO: 10480 - DNA, 362 bp, Triticum aestivum
  Clone ID: uC-tsrow189101e08b1
tgctttcctgccccagggaagaatttttacgaacatggtgtcatcaatcggggcaccaggcgatcgcctaccaagaagatgggattttacggggttatggcgttctacgcccctgccgagtaggttacaaaattggccctctgtttgctgatactccagaggtagcggaaattatctttttagctctaaaagcaattcctacagcggaaaataccatttacctagatgtgccagaacccaaccaagcggcgatcactctagcaacgaaatatagcctgcaggtagtttttgaaactgctcgaatgtacactgggcaagccccctccatcgccctagataaaatttacggagttacatccttt

SEQ ID NO: 10481 - DNA, 162 bp, Triticum aestivum
  Clone ID: uC-tsrow189101e09b1
ggtccagagggaaaagccccagtcccttggccgatggcagttcgtagtccggactggcattctagttgctacttttatcctcgctttggggagcctcgcaagccctagcctagccctagactataaccggggtaacttagtgggggcagatttttcccatca

SEQ ID NO: 10482 - DNA, 495 bp, Triticum aestivum
  Clone ID: uC-tsrow189101e10b1
ctcttcgatcgccagttccgccgcttcaccacggtggtttcactgatggccatggtgccactgagggagtggtgcaaaccaactttaatcggttccccggtgggagcagtaccggtggtgggggactcagtcggttcagcagtgggttcggtggtaggttccgtgccgccgccacaggctttgagcaatagactggcgcctagggttgctgatccatacagcaaaaatttacgtcttccaaaagggttagtcatacgcgaaaaattattacctcgtaaggattctaaatatgcttgttggctggtggggaggagtttattgggcggaaacagtgctcttaaaaagtttttatccgcagtttattttggtcaacaaggcagtggatttccagggtaaatccgccggaaacaaataagaccccatactacgagtaggttaagaaaaaattatgtagcataggataccgttttgtccgactaagccccttttgcgcct

SEQ ID NO: 10483 - DNA, 517 bp, Triticum aestivum
  Clone ID: uC-tsrow189101e11b1
cgccattcggaaaagcaaaaaagcagaaaccgggtggaagaaaaatccgcagaatacgcttcccagtctagcggaaaattacctcggctccatcccaactgacctaatattgaccctcccctctatcgacatatcgacagtgcatccattaaccatggacgaaaatatcggcctaagcctaggcatcgaacaatttaaccggcaagatttttacgcctgccataacaccctcgaagcagtgtggctagaggctaacccgacggagaaaaatttctaccaaggtattttgcaaattgccgtagcccactatcatcttggcaatcacaattggcggggagcagtgactttactgggggagggtatccgccgcttgaagggttttcgccctgaccatcgggaagtggatatagagagtttatttcggtccagcgttttgctgttagagaatctacaaactattacgccagaaaatctcccccaatggttagaatccgctgcagcggaacaactaaccccc

SEQ ID NO: 10484 - DNA, 369 bp, Triticum aestivum
  Clone ID: uC-tsrow189101e12b1
cccttctccccgacgggatgccagcaccggggcgatcgcccacggcattcgtttatggttgaggtattgtcaggcaggggtatttgctgctagttgacccggcttaaaatcacagcaaaccattgttggtcatcggtccacacttggagtggctctaggccatggtccgccaattgccggggaatggcgttgggattgttagcatggagggaaaatttgcgggatatttccgtcagaatggtttctccagcttgcagatccaccgttaaatcaagattttccaaccgcaccgtttgcttcgtgccactgcggaaatacatttcaatttgggattattgctgattaaatacagcccgatgggaaaagtta

SEQ ID NO: 10485 - DNA, 123 bp, Triticum aestivum
  Clone ID: uC-tsrow189101f01b1
aattaccgcattcatggtgcagttaaatgcccgcatcaaagctgctataccgaacattctagtatccgtctgccctgccacctacaatctcgcttacaacacttttttgcaggattggttgga

SEQ ID NO: 10486 - DNA, 322 bp, Triticum aestivum
  Clone ID: uC-tsrow189101f02b1
cttttgtggagaccacgggggaaacccctgggcaactgcgcctggcctatgctttttccctacctccctttatcagttcttctgagattcaaggggctgtggccaaggtgatcgccgtttgcgaaaatctagggcatcaattggaggaagcctgttttgatgtcactagtttaattgaaccctttgcccaaatttggaaagctggggtgggggcttccggcattcctttacccctgttggaatcggttaatcagtggttaggggaaaccagtggcactgcgggggactatctgcggggggtaaggaatatgcaggtgatttc

SEQ ID NO: 10487 - DNA, 477 bp, Triticum aestivum
  Clone ID: uC-tsrow189101f04b1
ggaattgggagcgttttctaaccatgggagtgtaaaagccgaaaaacgacgcaacggaaatagttaattgactcaggtgaacaagatggccgagaaaagccagcaaggaaggtaatctaaggttattgtatccactagttcagggattgatgggcgcacaattcttaatatttttgaccattgttgctgatttccaggctgattgactgtggatttttgtggccagttccagaacaggtggagtagttcaagggatagtggtcggttaactgggggggactatggggacatttacctatgaaaggcaagtttacctggcggacacggacggagctggggtggtttatttcaaccaatttttgcaaatgtgccatgaagcctatgaaagttggctgtcatcagaacatttatccctacaaaatatcattagtgtcggggattttgccttgcccttagtccatgccagcattgattttt

SEQ ID NO: 10488 - DNA, 231 bp, Triticum aestivum
  Clone ID: uC-tsrow189101f06b1
aatttttggccccgacttagaacaactccgcaccctcgggaaatcggtggaaacagccatggcggatattcctgggctggtggatttacaactagaaccccaagtcccggtgcgtcaggtacaaattcagtttgatcgcctagcggccgggcgttatgggttaaccgttggtcaactttctgagctggtagaaacagcattgaatggtagagtcgcctcccaaattttgca

SEQ ID NO: 10489 - DNA, 420 bp, Triticum aestivum
  Clone ID: uC-tsrow189101f08b1
aagctcccttagctccttctgattaagcacttggtagtattcatcaagttctcgtccaacaaatattattcgtccccagtaatccttagaattgtgccagcgtttccagtactctgacactaatgccaggcgagtttggcggttttgtgaggtcaagatgccgatttgggcaatcccgaccacgactagtagtcctgtagcaattgcagtgattgtcgcgttgtccatttaaaattgggatagttagaaaatttgagccagacttaaggactacacagaaaatcttcagtctccccaatacagtgattgtgtctatgctttggagaagctttgtttcaagacgaaataaaatcctttcctggtaataaaatattctgcttcggtgatgataaggggtgaattaaatgaatagtcaaaatt

SEQ ID NO: 10490 - DNA, 384 bp, Triticum aestivum
  Clone ID: uC-tsrow189101f09b1
tgggggctccgggggggaaaactcccaggcttggggacggatttccctctagccttgggtttagccagtagtttctcttttgagcgctgacattgccccccagtcggcaataatgtatctgtcgttaaccttgtctttgccaggcccatgctgatttcccgtgcccctgtccgcattagtttttttggtgggggaaccgattatcctgagtattttctccagcatggtggtgcggttctagctacggcaatcgacaaattttcctacgttactgctagtccttttctgagtcatttatttgactattccattcgcgtttcctaccgcaaagtggaattggttaaaaatcctagcgaaatggagcacgtggtttttcgggaatgc

SEQ ID NO: 10491 - DNA, 536 bp, Triticum aestivum
  Clone ID: uC-tsrow189101f11b1
taataatcctagggacttagccaagttggcctcttgggaagattacctactttattacgaggcggaattgtcaccagcttgtgaacatatcttggttgataatactcttaataaagaaatcaagaaataaagaattctgatatgggcacaaatagcttaatctagggtcatagcaataaataacgaaaacaagaaaacacgaaatgaagataatcgccgtgactggctacaaggggggagttgggaaaaccatcacctcgattcacattgcccgttacttagccgacaagggaaaagtgttgctaatcgactctgaccctaaccgttcggtggagaaatgggccgcccgtggggaaaaacaacccttatttaaggtcaaaaatgaaaagtctgctccagcccatattgccgggaatgattttttggttttggacaccctcgcccggcccgatagtaatgaactcaaagaaattagccaagaggcccatctaacaattctgccctgcgtgccggatgccattagtcttgaccccatg

SEQ ID NO: 10492 - DNA, 540 bp, Triticum aestivum
  unsure (1)..(540): unsure at all n locations
  Clone ID: uC-tsrow189101f12b1
ttaagatttttaaacatattttttatcagggatataaagaactcataaatattgatgtaaaagttgatttacaactgcaatagtgaatcctatcaaagctcccaatgggccaaagaaaaatattgaggtcattgctaattccaagggcttgtcctgaacattagtggagaaattattgacaataaagattccagccataacaccaaaagcataacctaccaatgcagcaagtaatgcaatacctataaatttgagcatatttctagtttcatttaacccaaagaaaaaagaataaactttaatatcaagaaggcaagaataaagatgtggttcccggcactttatggtcgtcgtccctccctttttttactgcctccccatccccccgccggacaaaagctaactatcaaggcctagagccactgaccggcggccccccgagtgggggcgagaaagcaagaaggcangaggcgtttctaatattcgacgataaaacccgttggtatggtcggttagagcaataaatatttcactggacta

SEQ ID NO: 10493 - DNA, 369 bp, Triticum aestivum
  Clone ID: uC-tsrow189101g01b1
aggggagtgcccagaaaagcggagattaaaagaaaaacagtgaccccaaaacaaactcccaaagaccactgtttcccactggggttgcccaggagcagtagtagtaagacaatgggaatgagggcgctggcaaaaaaaggatttaacaaacctgtgccagggagactgttacccaactccggtaaagaactacccatggcgcggaagggccattggggcaagtcaaaaatgtatagaccctgtagaaagaataagcccgagctaccgaaaattaatccccagttgaacggccaggtaaattgcaacggtagatagatccgcaacagtaacaccaacaggtatgaccccaacaccatggctaatttgggt

SEQ ID NO: 10494 - DNA, 353 bp, Triticum aestivum
  Clone ID: uC-tsrow189101g02b1
aaattgattagcctgtcgtgcttgagcgtagttgccaactccagttcttgggtttgttctttttcccttttgctatcccagaccattaatttcaccgcaaccttggcgatcgccccatcgtggccgactgtttttgacagaaacactgcgccgaacccaccaatcccaagcaaggtttcaagtaagtacttgtccttcaaatgggttccctctaagcttttccaggactgtaaaaacataaactctataatcaagttgggatcttggtaaaacaatgatagttccaccaactcaggaaaactgtaaagattaataaagttgtttagtattgaaattttattttgagtttggac

SEQ ID NO: 10495 - DNA, 356 bp, Triticum aestivum
  Clone ID: uC-tsrow189101g03b1
atgcatattccagcctatggccccatgccggtgctcacctacaaggctcaactggaaaccctattggcggcagggcaatggtatcgggatagtcggggcagtaatcaatttgagggccagccccagatgctctcctgtggtttacccctgcccaatctgggggccatcaaggcacaattcctggccactggcggacaacccgcagattttgaggagcattaccaccgccgctcccaaagggaagtgttgcaaaactttggccgtcagcgggctaaccgctacccccgccagcagtttacccatttcattatcaccggcgacccccagcacaataccatccacgacctaggctgggt

SEQ ID NO: 10496 - DNA, 528 bp, Triticum aestivum
  Clone ID: uC-tsrow189101g04b1
aatttagcagcatatgaaatcacagtaagtaatctggctgtaacagaccctgaaaatcccaacttctccattccatccggagagcaaagaagtaagggggttgaattcgatatcgcgggggaaatcctaccgggctggaatattattgcttcctatgcttataccgatgccagggtcaccaaggatgacaatctggagcctggtaatttgcttgagggggttccctttaactcggccagtttgtggtcaacttacgaaattcaagccggtgatttacagggtttgggatttggcctgggattgttttatgtgggggaacgccaaggtgatttaaataattcttttcaaataccgagctatctacgtactgatataagcgtattttaccgccgcaataactggagggccgccattaacgttaacaatcttttcaatatagattacatcgaagcgacccaacgccggactcgcgttgatcctgcggcgcccctaacggtaaggggaacaatttcggtggaattttaaact

SEQ ID NO: 10497 - DNA, 500 bp, Triticum aestivum
  Clone ID: uC-tsrow189101g06b1
cggaaagggaagttggctttatggtgctagcgggagcaggggcagaaatcgataccagtaccgccaatggaagactattcttcgccgtgttcgccgccctagcggaatacgaggcagagttaatctcagaacggaccagagcaggactacaggcagcgagggcgaggggaaggatgggaggtagaccaaggaagatggatagggtaatgctccagatgttaatggaagcgatgaagaacccagaagcctgtgccaaggcagtagcccagaagctcaatatcagcaccgccaccctctactcctacgtcaatggggacggcaccccgaaagaagccggactaaggttattgagaaaagcccatggggaacagcaagaatcagagggaccccgataatctcattgtctgctccccttccccccgactgcaaagtagggatagggaaacatcgccctctgctctgaaagggagcattagcatttcacagggtatgggggaata

SEQ ID NO: 10498 - DNA, 319 bp, Triticum aestivum
  Clone ID: uC-tsrow189101g07b1
ccggacattgtactggtgggagaattgcgggatttggaaaccattgcccttgccatcactgcggcagaaaccggacacttggtttttggcactctccacaccaactcagcagcgggcaccattgaccggatgttggatgtgtttccggctaaccaacaggcccaaattagagccatgttatccaactctttactagcggtatttgcccaaaacttagtcaagaaaaagtcccccaaacccggggagtttggccgggccctagtgcaggaaattatggtcattaccccggcgatcgccaacctaattcgggaaggcaaag

SEQ ID NO: 10499 - DNA, 380 bp, Triticum aestivum
  Clone ID: uC-tsrow189101g09b1
tgagtgcggccgtttatctcggtttcaaacccaaacccagggtatatccctagaagcccaagcccagcgggccattcccctggccactgccttggacaatggtcgtcccaccttggtggaattctatgctgactggtgtactagctgccaagccatggctccggacttagcagagttgaagaaaaactatggcggttcggtgaactttgccatgctcaatgtggacaacaataaatggttgccggaagtgttgcgctatcgggtggatggcattccccattttgtttacctagatgacaccggcacggcgatcgccgtgacgtaaacgctcttccacatagggcaacatacgttcaataatttccgctcggctggggact

SEQ ID NO: 10500 - DNA, 458 bp, Triticum aestivum
  Clone ID: uC-tsrow189101g10b1
cccacgacattgatgaagccctcttcctggccgatcgccttgtgatgatgaccaatggcccccacgccaacattggcgaaattatgaccatacccttttctcgcccccgggaccgggacaggattatggaagaccccacctattaccagctacgtaactacgccctcgacttcctctataaccgctttgcccatgacgacgtggcttagaaagttatagccaagatactactcccaaattgtttaggctaattccctgctttttgggagaaattgattccaacagtgcgctaggagtagttcttgagacgaatagttgctcgtactacatccaagaactttccgggggaacatggggaacatatagttcatttaagggtatgctaatcggcgtaacacacttttgcggatgatatacggaaaagctctggcgatcagggaattattgctcttctatca

SEQ ID NO: 10501 - DNA, 456 bp, Triticum aestivum
  Clone ID: uC-tsrow189101g11b1
tgctctgcgccggatagtttgggggaagaccaactgcgaattttaagtttgtttaaacggagccaacaacgatggattactttgtttgggggaataattagtctgggtctattgtggctggtgtattactacgctccgatcgcctatccttgggtgacggatttgccccagattcgtttggcaggggttgggctagcggcgatcgcctatttgatggccaatttatttttgcaggtgcccctgagtgtgttgggggtgttatccacaagccagtccaagtttactgagacgattcccctagagccaaatcagatcgaacaacagttcaccattcccggcattaagttgcggcagattcccctggtgccaaggattagctcttgataacaaaggatttgcgctctctgctggggtagaatcggtaacgggcgatttttcctaggtttagccgatgtt

SEQ ID NO: 10502 - DNA, 399 bp, Triticum aestivum
  Clone ID: uC-tsrow189101g12b1
cctgccgacggcgatcgcgccattccagggtggtgaggtagagaatgccaccactaacaagcactagcattaccagggccgctaaaaaaagggtgttgaggacaggagtaggagttgcttccacggtatcaaagactcttaaacaacgggaaatccaggtttaatcctagaagccgttccgaccccataccaccatgctgatggaccaggtgaacagaactaacacgcttacccaacctaatgtcaaaatgtccatagtcttttgttaaatacgccaataaaaacaagctttgccagcctttatcttacggcgatcgggcaaaattttaaagcttgcctcagggacaaaacgcccgagctaatctcccctggaaccatcattgtctctatccccttttt

SEQ ID NO: 10503 - DNA, 336 bp, Triticum aestivum
  Clone ID: uC-tsrow189101h03b1
tgggggactgttggcctgtgaccggtggggagtggggcgtttggcgtaactcggcgcaaattatgcatcgactgcaagcactgctgttcaccggaggtcaggaagatttacggggtaaaaggattcttatcaccgctgggggcacccaggaatatctcgatgcagtgcggtttattggtaatccgtccaccggaaaaatgggtttagctctggcccagtcggccggcgatcggggggcaagggtgactctcatccatggccccataggggatttgcccatacccatgggagtaatcagtatggcggtggtcaacgccgagcaaatggagcaagcct

SEQ ID NO: 10504 - DNA, 547 bp, Triticum aestivum
  Clone ID: uC-tsrow189101h04b1
aaagttaggcttgaaacctgttgtggccagtcttaaattgagtacaattttagggttttcatccatgttttctagaataatttactgggaaatttagttagaagttttagtaaatttttcgtattattagtgagcaaagtacggcggtaagtatcggcggcttttttaatcgcttcggcctgggtgggatagggatggatcaccccggctaatttgcttaagccaattttattaacaatagccgtggtaatttcagaaatcatttccccggcatgggaggcaacaatggtagcacctaaaatttcatcactgttggctacgtggataattttcaaaaatccctctgtctcgtcagcggcgatcgcccggtcaacctgggaaaagggaattttaataattttatagcctatgtctaaggcctcagccatagtttcatttaatcctacatgggcaatttctgggtcggtgtaggttacccaaggcatggttaaactgcttagtttactgcgtcctaaaccgaagggagaaaagagagtatttttaatca

SEQ ID NO: 10505 - DNA, 442 bp, Triticum aestivum
  Clone ID: uC-tsrow189101h06b1
aatacaaaaagcgacgtttgagcaaaggttggattaataacaatactaaaccatcaaacaaaactaacacccccaatacctgggcgaaattcaaactgaaccaaggggcagtcaaaaccgtactatccaaaccccagttgccattcaggtaaatgtaacggattggttcgatggcataggttaatggatttaaactggccaccacctgcaaccaatgggccatgaagtccaaaggagcaagggcagtactggcgaagagtaggggtaaattagtgacaaaaattaccgcaatcaattcaatgtggcccggcagggcaaaggctaaacctaaacttagggccgttacccccaacacgattaggaaaacaatcagggcaatcattcccaaaccaaagctattgggtaaaccagctcccagcagagcactggccccgacaatcac

SEQ ID NO: 10506 - DNA, 441 bp, Triticum aestivum
  Clone ID: uC-tsrow189101h07b1
gcaacaggccttagccggtttggaagaacgtacccgccgcattgtggaatttgtttttctccacgactttacccacaaggaagccgccgaaatgatgggggttagtgtgattaccgtttcccgtcgcattaaacagggcattggggctctgaaaaaagccttaaatacggaaattttttaactgtttagagtctatctccagtagtaagtagcaaaaattcagccaaggtcggcgatcgccctggtagtatggcaaatggagctttatgtctaacttttccattttgttttgagccattgtgttaacctatgctgcaattgacccccagtgccgcccaggaaattaaacgattgcaacacagtcgccaactaacccgccaccattttcgtttggcggtcaggcccggagggtgcgccggttggttataccatttggatttt

SEQ ID NO: 10507 - DNA, 372 bp, Triticum aestivum
  Clone ID: uC-tsrow189101h09b1
ccctggactaggttaggatttattaatgtaaaaaaaatataagcacagtcaaattgtctccaaacttggcatctaagcttagcgtttgcttagaataacttaattgcgtttatttaaaaatcaataatttctcttttttggaacgaacaaatgtcatgaattcctcgctttaccatggtgaaaaaatccgccattggtttcctaactcctccctagattttgtttcctcactacatgcaatgttggacaatttgtcaaaatggtttcgtaatttacctatcccaaattttagtaacaattccttgtttctccgtggagttagtaaagttcccaactctccccaatttaatgacccaattcaaaacctggcct

SEQ ID NO: 10508 - DNA, 532 bp, Triticum aestivum
  Clone ID: uC-tsrow189101h10b1
ttttgggacagaatcaagtctttactcaactttgccaaaacaagcctgcagataagattaatcaactgttacaagaccgctaccatggcattattcccccagaagaattacaagataaaatcactgctggagaaagggaggcattggcacaacaactaagtgaaggcggggaaatgaatttggatgccatccgaaccgaagggtcaggggcagaactagatgctaaacttaaccagattgtcgccattggtggggaaaatttagacggaagtggtagtggtactttaaatttcagtagtccctatgtttttggcggtggattagtcggcttgctggtgttggtatggtgcctgcaatctctgaatacttggtcaaatttacgggaaaaattgatgggggaagagggagtctattatcaaattttagaaaagtttggcaaagctaaacctaaggtttctgaaagtgatttatttctctataacaaagctttggtggagttagaaaagcaggctaaaaaagctatcagtattga

SEQ ID NO: 10509 - DNA, 509 bp, Triticum aestivum
  Clone ID: uC-tsrow189101h12b1
tttgaccgaagctggactggaactgaccctggctaccacgggccgcttatcaacaccaaccacttccgttgtgggcaatgcactaattgtagatattcccaatgccatcctagccttgccggatagtgacggactgcaacaggaaaaccccaccgaagaaattgccctagtgagcgttacagcattacctgataatattgttcgcattgccattaccggggtcaatgtgccgccgacggttgaagttaatgccacagaccaatccctggtactggggttaagtccagggaaaggggtggcagatgaagaggatggcaatgatgctatccaggtagtggtgaccggtgaacaggatgaaggctatgcggtggacgatgccacaacggcgactctaaccgatactcccttacgggacattccccaatcgattcaagtggtaccccaacaggtgttggaggacaggcaaataattcgtgcttcggaagcactgcaaaatgtcagtggtgtgc

SEQ ID NO: 10510 - DNA, 396 bp, Triticum aestivum
  Clone ID: uC-tsrow189102a01b1
tcttgccttggaggggattgccctggatgcccaccacagtgaacgtttccgtcacggcttgatcggccaagattggcggattcaactgttccgccacccgtcgtaccccgtcgtaatagcactgcttccggattagtggccagttgatcaatccagccaaaggctccaccagcgcttgtgtcgttgttattacccctggggggagtagacaatgccccagcaattttggggggagcggattgaaaaataacgttaaattccccccggtccagggtgggaacaaatccctggggaatgaggggaataatggctaagcctgccattaaactgactagggccagggccacaatccaccaacggtgtgccaaagaccaagctagaacccgttgataacca

SEQ ID NO: 10511 - DNA, 243 bp, Triticum aestivum
  Clone ID: uC-tsrow189102a04b1
aggatctttttaccggccgcggctagcacttgatgtccagaagcagtcttaagattgtttggtgtgaccgtcatgacatttaccagggaagtatacttttattctcacagaggggcttagtcctgtttatgaggtagctcatggagagaacgctgacctgttcctgatgtcccctatggtctaatggaggttcatgagcctccccgacaatgtcaccatgcagatccccgggtaccgagctcg

SEQ ID NO: 10512 - DNA, 385 bp, Triticum aestivum
  unsure (1)..(385): unsure at all n locations
  Clone ID: uC-tsrow189102a06b1
aggatctgaagaatctattacacaaaatgctttgttagcgtagatagtatagataatatatttcgtagtattcttaccgcgcaaaaaataactgaagaacaacataatcagttagaaaaatacataaacacgattgaggatttttgcagaatgttcatgccaaaatttgagtctatcaatgattcattaatgagtgatgaagagtattcagagaaagtttataaagaattttcatcacccaggtatgactctaatgagcagaatgagcagaggtacaaatacaactataaatacagtaaggtaggtgaaatgtatataatgaatagcatggcaagtttatttcaccaaatgcattcaatcngagaaagcataaaatttttgtatg

SEQ ID NO: 10513 - DNA, 450 bp, Triticum aestivum
  Clone ID: uC-tsrow189102a07b1
atctgcaccggcttattaaactgactagccataggcctgtgcagccggggaaaacgttgcaaaatttcccccaggggcaacatgcgggcccacatgagctcatcccgcagggaaaataccatctgcttttgcacatgcactgtttgatgggccggcctggaaagtagcaccacatcatccacggactactccaactgcatgatttcttccaaaatttcctgcaactgggccgatagggtgccataggaatccatttccagggcatcgaagttatgctctagccatccctgggaccttggctgggcccgcaacatggcttccccctgcggccggattgccaactggtccgccaactgtctcagtttcagcgccatggtctggaaggtgccaaaacgttgccccagggctcccacagccgtttgcaattgctgattttgtaaagacaggcta

SEQ ID NO: 10514 - DNA, 441 bp, Triticum aestivum
  Clone ID: uC-tsrow189102a09b1
ggtgaagtgaatcaccacagggactgatttggattgaccactggcgggggccgtaaactgcatttttctggctgccaatagggcctggcggttgacctcgctgttgccgtgggcattggtgatggttacgctggtcacaccaccactatcatttactgaaattaatactgtagcactaccttcttccccctggaggatggagggataactgggtttacattggctaacgcactttaaggggtctggcttagcgggggaactgggagttggtttcggtttagggggagcactactagcaacgggattggccgcaatgggaccaacatttgcccctgcattgcctgcaccgggccgttctgctctgggttggccggagcccagactagggccagagctaccaccaccactggcaatgggtttagtagctgtccccggtttcat

SEQ ID NO: 10515 - DNA, 371 bp, Triticum aestivum
  Clone ID: uC-tsrow189102a10b1
aggatccgcaatcatcgagattttgggttctgtctcattaaaactcacgtttcgcacataatgcaaaatcacttatagctgagcacaataccaggggtcatgccgagatacgtgtaaaaaccttcacatatatctaaaataggcttagttttagtagtggaaaatttttggtcgctcatctaaacagtcccatttacgatttttggctttacgagtctgtctaacaagaaatcaaggttttccggtaattaggcggtgaagttgtcctacttatagtcatgaatgggacagtaatgattcagataaattataaaatttgatgtctggaagcattactggataaagctttcagccttaacgaccaaattttt

SEQ ID NO: 10516 - DNA, 216 bp, Triticum aestivum
  Clone ID: uC-tsrow189102a11b1
taccgaaaccatttacctcgacgatgaaccgcccgatcgcctggtgggtttcatcaaccccatgacttttatcagtggccagctcaccattgatgaccccactatgctccgcctggaacagtccgcctttgcctttgcccccatccgcaatgccggaggatttgtcaccctcgaccatgcccccatcgaaacggcgatccccgggtaccgagctcg

SEQ ID NO: 10517 - DNA, 410 bp, Triticum aestivum
  Clone ID: uC-tsrow189102a12b1
caggtcgactctagaggatcgggggaatgtggagcttgatattagctattttcatttggcccttccgtcccaatcaacctttgcggcaaatggttgccaacaattacagcattttaggcaattatctccgggccatggccgccgctaactttagtcccgatgacccccaagctcagcaattggtggtcaaactgcgtcaaaacttgcttaaatctcggcaaactctggtggccagccagcgaggattatggggacaaagtaaattaagggaattattattagttttaatcgagcatacggaaagattaaataaatgcctaatgttgctcaatgaaattgttaatttccacaatctaccccaattacaaacagtggaaatcctaatggaagatgcgtttaatgctctgggg

SEQ ID NO: 10518 - DNA, 157 bp, Triticum aestivum
  Clone ID: uC-tsrow189102b01b1
caaggccaatgaaataaaacctattctttagggttggcattccttgctaggtaggtgattattcccccgatgattgcacctccaagagttagaccgatttgcttccagttttttagctccccaactttttcggccagatccccgggtaccgagctcg

SEQ ID NO: 10519 - DNA, 474 bp, Triticum aestivum
  Clone ID: uC-tsrow189102b02b1
ctatccagtggcaatttagaagactatggccccattgccggttctttccagccagtgttaggggcaacggaaccggaagatggcaacctcagcaatagtgttttgtactatacttttcctgccacggaaaatattcgtctgtgggccatgggggccgggggcgctttcgacgatttcaccaatacagtcaatgttttagacggggatggagcctttggagcattgactacctttggcacccgtagcccgatctatttcttgggggaaggtaccggggcggccctccagggcacctgggataaattacaacttagccttggttacctggcccccgctggcaatgatccttcccagggagaaggattatttaacggcagttttggcacgatcgcccaggtaaactatgatttcagcgataatctgaccgtagctgtaacctatagctatggctataacaccttggacactagcacc

SEQ ID NO: 10520 - DNA, 80 bp, Triticum aestivum
  Clone ID: uC-tsrow189102b03b1
ccttgcaggggattgccctggatgcccaccacagtaaacgtatccgtctttgcttgatcggccaaaattgggggttccaa

SEQ ID NO: 10521 - DNA, 420 bp, Triticum aestivum
  Clone ID: uC-tsrow189102b04b1
attctatctggcattatttcggaacttcaacgttctaccacaagtaaagttccaattctaggggatttaccggtgattggagcattgtttaggcagtccacagacacaacagaccgttcggaagttattattctcatgacccccaagatcattcatgatagtacagaggcgcagtttggcttccgttacaatcctgacgcggctacggcggaattcctgcggcagaaaggatttcccgttcaggctcagccatagttaaattcctagcgggagactaaagtgttgaccagccgttccagaatgttaactcgataatagggttcacaaatctgggatagctggtttgcttttggttgataatttctaaacaagataatgttgccgtaaacgctttgaggggggaaaagtttatccaactca

SEQ ID NO: 10522 - DNA, 370 bp, Triticum aestivum
  Clone ID: uC-tsrow189102b05b1
agaggatcttcctgcaccattttgctcagagccatacccaatttttcgtccatgccttttttcttgggcttaatggcaatggagatcaccgggtcggggaagaccatgggttccaaagtggccggatttttggggtcacagagagtgtggcccgtttgcacatttttcatgcccacgatcgccacaatgtccccggcttgagcggactcaatttcttcccgggaatcggcgtgcatttccaccaaacgaccaatgcgttctgttttaccggtggcagtattgagaatggtgtcccctttactgagggtaccggagtaaatccgggtgaaggtcaaagcaccaaagcggtcgtccataattttgaacgcca

SEQ ID NO: 10523 - DNA, 268 bp, Triticum aestivum
  Clone ID: uC-tsrow189102b06b1
aggatccgttaaatccaaagatgaccagctagtggccctccatgtggtcaacgccgttgactagttgatgattgtcaccaaccggggcattattatccgccagtccgtgaacgatatttccccccaatcccgtagtgccactggggtgcgggtacaaaggttagatgccgatgatgcgatcgccgctgtggccctagtgcctccttctggggaagaagaattggcagaaatgtcggaaagcgaagagagctgatggccccccaaccta

SEQ ID NO: 10524 - DNA, 341 bp, Triticum aestivum
  Clone ID: uC-tsrow189102b08b1
gcaggtcgactctgaggatcccgccagctataccaccaggcaatggcactggcgaagcaaaaaataccaaaggccgccatggtgtaaatccccgtttgtcgcaacactaacggcaactgccacaggtaaaattcttttactttgccccattcctgtcggcgatcgccttggtaaatctggctgtaggccctagtgattaaagcttgtaagttttgcctcatgcggggattgagattatgggtttgggctcgggccaggtcggcggaagtagcccggggtaaactagccaactgttgaatgtcctccgtggccaggaacttgatccccgggtaccgagctcg

SEQ ID NO: 10525 - DNA, 452 bp, Triticum aestivum
  Clone ID: uC-tsrow189102b09b1
cagaataattggcgatggaggtaatcaccgcagcgtgatttgccatggctgccagcattaagggggtttttccttcccatagggtttggtccaggtcaacccctgcccggcccaaggcgttaaccatgaccgcttgggtctgggcattcccatgggtggcagtgagggctgttaggaggggcggatccccattgctggaaaaattaccgtcggcgccggcattgagtagttgggtcacaatctccacatgtccctgggcgatcgccaaatgtaaggccgtgtcccccgcttgattgacggcattgaccatatctttggggcccttttctaacagaatggtcaccatggattggtaaccttctaaacaagcaatgtgtaaggctgtatcgccgccatccccagcctgggtaaggggataaccgccctggatgaaagctttcacctgatcaacg

SEQ ID NO: 10526 - DNA, 338 bp, Triticum aestivum
  Clone ID: uC-tsrow189102b10b1
aggatcgggatggcaagtgattctcatcgagcaaatggaggctttgatggatcgcttcacaatctttatgaagcgctttgagctttccgatgacttcatggccaagatgactgttgagcaaatgaaaacccaactgggccagtttggcatctcccctcagcaaatgttcgaccaaatgaatttgacactggaaagaatgaaagccgaaatcaagtagacttcacggtgtcgaaattgtctagccagacgttcctcaccaatgtcagaatgatgggagtaggttccccgtagcaattgcgagaactatgcccaccctggatccccgggtaccgagctcg

SEQ ID NO: 10527 - DNA, 304 bp, Triticum aestivum
  Clone ID: uC-tsrow189102b11b1
caggtcgactctagaggatcaaaaaccctctttttggcggttcaacatccaggggaactcaatggtctgcttgcaaacagagatagtcactatgcctttaaccaccacgaatggcgaaccgtttctgcaaactcgtactgtcccgttacagtcccattggccgaatagtggagatatgctatcccgtccagcagtagtaaccattcagcggcggactcgtcagccgtttcattcgtcttagatcatgattatttgatgagtaaagggtcatggtgcggagtgagatccccgggtaccgagctcg

SEQ ID NO: 10528 - DNA, 276 bp, Triticum aestivum
  Clone ID: uC-tsrow189102b12b1
tgctcccaacaaatatcaaccattggcaaaaccccgaattatcctttggtgactttactgtactttctagctatccaacagtctcaaaaaaattaccaggggtttcgagaataaaacggattcttccaatgtagtcaaaaagcatttatggcaactgactaaacatccaaaagtccaagtacgcaaatatttggtaattcgcatacgcatcaggctacaaactcaactaggtgaaagttcagttcatccaacaaagatccccgggtaccgagctcg

SEQ ID NO: 10529 - DNA, 382 bp, Triticum aestivum
  Clone ID: uC-tsrow189102c02b1
aactgtctgcgagggaatgggctgggtcggtactcagaactagggtcttatggcctaattccgcacaacggagaccggaggccgccgcaacggaggttttaccaaccccccctttacctgtcatcagaattacgcgcatggatggatctgcctagaaagatgaaaaattggagacggaatgttacatattgttaacttccatgtctgcattatgccgggaaagccagatttcttgcagggttgtggcataactctctaggctgtggtgccgacggtaagcttgggccatggctgctaattgctgatggatgcttgaatcggccaacttttggtcaatttctgcccatactagggattgggcttgccaatccactactaaact

SEQ ID NO: 10530 - DNA, 504 bp, Triticum aestivum
  unsure (1)..(504): unsure at all n locations
  Clone ID: uC-tsrow189102c03b1
ggatcgccgttgtagtgcccgcagtcttgctaatagctctgccatcacaaacggttttgttagatagtcatctgccccggcatctagtccttcgacacggttttccggttctcctaacgctgttaacatcaacaccggcaaggaattaccctgggttctcagtttttgacagagttccaaacccgataatcccggcagtaaccaatccacaatggcaagggtgtattccgtccattgattttccaaataatcccaagcttgggagccatccgtcacccaatccaccacatacttttcactaactagcactttcttaatagccattcccaaatccgtctcatcttccaccagcaaaattcgcatcgcctctgccttttttataacggtctgatcttagcgggggaaggagattttcacctgaatttcatacccnctttggcagactgggaaaatcttggacaaattcccaatttgaggtggtgtgatgaaaacaattcaattagc

SEQ ID NO: 10531 - DNA, 400 bp, Triticum aestivum
  Clone ID: uC-tsrow189102c04b1
tcgccctgttgactctttcccattatttttggcaatttgccctgcgattttacactagtgcttctagttgagtagaacaaaaaataggtttggacagagcaaagttcacgtctacgaaaaagtagaaatgaaaaccattgccccgccccttaacaactaacttttactccgtaaattttatagctatttgaaataaaattaagacagtaagaatttctgcaaggtttagattaaaattaccttggttatttatattgccctatgcttagttgaattagctataaactaaatcagtcaattagtcagctaatttaattagggttgtaacttatttgtttgctgatcggtgccccctggggattctgcaggctgaatcgatggaaaataaccgagtatgcca

SEQ ID NO: 10532 - DNA, 433 bp, Triticum aestivum
  Clone ID: uC-tsrow189102c05b1
gtagacctaggcatgcaaagtatcttgatttctggtgcatgctctcctcaaagtttggtcaaggtggtcaactttgacaacgttatcggtaccattgggaatgacatcattattggtgatgatcaagagaacattcttgatggcggtaaaggcgatgacagcatagttggcttccaaaaaaatgacactttgatgggcggtcacggcaatgacactttgaatggccgtgctggcaatgatctgattatcggtggtgccgataaggatattttgactggtggtatgggtaatgacctatttgactacaccaatcttaaggattcccagctcggcctctcctggttcaacgttaatttgtccaaggttgacgtgattaccgatttcactcgtggtgaagataagttcttggttcaatctgcccccaccaacaacg

SEQ ID NO: 10533 - DNA, 440 bp, Triticum aestivum
  Clone ID: uC-tsrow189102c06b1
ccaataaccatgggtgattttttagctctacgtttcccgttatccccggtatctgatcagttttaccctgggcatctttttctccgttttcacttggctccagcccctattaaaaaatcgtgtcggggcgatcgccctgatgggactgctggtcagtggattcatttttctctatttcactctgcgggccatgttaggattgaccgtgtagagggagtttgggctaatctgtccaggctcggacttttttgttgccgaggagcaggtctatggctaccagtcgtcgagtttcccgggtgtcgtccctaattaagcgggaggtcagtcaaatgcttctccacgaaatcaaagatgaccgggtgggcacaggcatggttagcgtcacggaagtggaagtttccggcgacctacagcacgccaaaattttcgttagcatttac

SEQ ID NO: 10534 - DNA, 355 bp, Triticum aestivum
  Clone ID: uC-tsrow189102c07b1
aggatcgccgacaggtcacaggcccgccgcaacaaggctaattcagtttcacttttaacttgccggaggggatgcaccaagggatgggaattcactaaagcttggggaccatagccttggcggggataggcggccaattgtttttgccagtgcttgaggatggtttgatttaacgcttcatctcgaccgaggtggtaatggattttatctgccttttccagatatttcggtaaatgctcatccaattccccaatgggataggcaatgtccgacccaaagctggattgaaccccctccacaccgtagcgaatgcccgtccaggtttccttggctggatccccgggtaccgagctcg

SEQ ID NO: 10535 - DNA, 309 bp, Triticum aestivum
  Clone ID: uC-tsrow189102c08b1
aggatcgccctgagccaaagcaagtggccgaatacggcaaacactggcagccctatcgtagcctggctagatggtatttgtggcggaggttgtccgcaacagctagccagattcactcgaaggcgttagctctgaaatttttctagtcaaaacctaacaccattgatccctgagaatctctgcaatgcggcgggccgatccagcttgtcccagcctttcccggccattacaggcgatcgcctctagtccctcaacatcatgaagtacttgttgtaaagcttccccagattggtcaggactatgcaacaa

SEQ ID NO: 10536 - DNA, 490 bp, Triticum aestivum
  Clone ID: uC-tsrow189102c09b1
ggatcagtcaccagttctgccaacatttcagcgttacccaggataaccgctaataaattgttgaaatcatgggccacaccgccggtcaggtgccccaccgcttccattttttgagattcccgtagcctttgttccattgccatacgctcagttatgtccagcatactcccaaccatacgggtggctttgccttgtccatcgcgagtcacaaaaccacggtctatgacattcgcgtactggccatcgcttttcataaatcgataatcgcattcccagtaattttcttcaccgtcgataacttgataaatactgtggagaacacgctctttgtcatccgggtgaatgcgtagcgtccaggattctagtcccggctccatatctaacaaagcatagccaaacagatctgttatggagtcattccaccagacttgattggtagcaaaattccagtcccagatcacatcattggcggctttggatattaactgga

SEQ ID NO: 10537 - DNA, 335 bp, Triticum aestivum
  Clone ID: uC-tsrow189102c10b1
tcggagacttcggggcaattgttaaaggcatttaagagcctgttttaaatgtcctcctggcctccaatttggggggaaactgagtgaaagtcccccagtattgccggagctttagtgaagagatttagggggctgaacaaaactgctaaacacgttctaagcaataaggttcaaggaatgaaaatgactcatacaaacaggttattgttctcattcccagattaaattaacgttgtattttttgaaattttcgtctttgctaatgacggaaaaattatgttgctgagcctgggcaataatcatacggtcaaaaggatccccgggtaccgagctcg

SEQ ID NO: 10538 - DNA, 468 bp, Triticum aestivum
  Clone ID: uC-tsrow189102c11b1
caggttgactttagaggatctagctctttttgactcacgatataagtcagaaactcactacctactgctaattctttggcacgaccatagttaatcggatagtttttggttgcacctttcccaccaaattgaacagaacgaccataataggcagattgagcagctttaaaggtattaatttgataagaccaatggataggttgagcaggaaaaacataaattcctgaatcattaaggtggagtaaattttgctcacgatctcggtctaaataagcaggtgtttgggcattctgtccgactaagccataaggatggggaataattgttcctttaaaaaaagcataacttaatgcccaattatggaaatacttttctgtttcatagagaattcccatctctcgactggcaaaaaaaacattgtcatggagagttaatttacagcgataaatttttgtcataagtttacct

SEQ ID NO: 10539 - DNA, 432 bp, Triticum aestivum
  Clone ID: uC-tsrow189102c12b1
aggatcgtcaaaagccgcaacttttcgggaatggtcacggctgaggagtcatgtgattacggttaaattgctggtgctcggtggtcaggacgctgaataattggtttgcttatatctaacctttaccctgtccttctcttatctttgccaattgattatctaccccaaccttagttgggaaaaccaacaggcaaaagcaacgtattgtttttgcaaccaggaggtgcattaactccagtcaccgtggcaaagttatgaacagttgggctcgctcccatgcgaaaggttccggtggaaggataagaactactggatgatatggtggcaacaccgcaagcattggatttcagctttctttcctttggtatgggaaacgtgatgtcgtactgggtgaaaggggtttgccccgtccacactaaagattgattaccc

SEQ ID NO: 10540 - DNA, 508 bp, Triticum aestivum
  Clone ID: uC-tsrow189102d01b1
tcccggtcccatgggtcattgaccacacagcctaaaccactggtggccaaagttcccaaagcaatggtgcctagtaggggtaggggtggtagaccttgggccgctaaacacactgcccacagcgccggaatcattaaaatcagtcggccggcgggtttatgccagcgcaacaggtaaatgattgttaaccagaggggcggggaagatggggtttgggcaaccatagaaaaattaaaggactactagggggaaggggggcggtcactgctccaggcccaccaaccctgaccacattcacactggtaaaattcctgccatttgcgccgtcgatcatcccccaacactggcgatcgccgattgatccaagcccggagggcctgacgggggccagcttggcattggggacaacaaaaacccctggcatgaacagtatcctcaacccaagggggaggagtggggtcaaagactttcatggggttctggcatgggtaagggatggaaaaattcg

SEQ ID NO: 10541 - DNA, 475 bp, Triticum aestivum
  Clone ID: uC-tsrow189102d02b1
agtgcccaattctgtgacgattttgcggaacggtttacagcggcggcccgtacttaccaagttcggcctcaagctaaggaacatttagccattggggaaaaatgggacaaatttaacttttctttggagaaaaaacgcattctcaacgacagcaaagtggttaaagctgaagataacgttaagcaacattcccatacccatcaaaggctgtagttgcaaagtcccaacggggtaataccaaccttcaggaaacaagggattgttgttttttcctagcccgatgttgggcaaaccaatcctgtaactgttcacggcactgttcttggcacactcctcctaagctttgtaagtgatggttagaggcagcgctggcggccaaatcgaacacgctgtcgatggtgccggttttcgggtcgggggtgccataaactaataaacctaaacgggcttggataatggcgccggtacacatggg

SEQ ID NO: 10542 - DNA, 411 bp, Triticum aestivum
  Clone ID: uC-tsrow189102d03b1
tattgctgagaatggttgcttctagccccacatttttaactgctcgactgagggacaaagcctgttcgtagtaatttaatgcctggtcataatcctcacgggcatagtaaattgtcccaatattatttaaggttaaagcttccccatcccggtctttaatttcccgacgtaggactaacgcttgttgataatagtccatggcttgattaagttcacccaagccgtcatacacgtaaccaatattgctcaaaattgctccttccaccaggcgatcgccagtttcttgggatatttttagggcttctttgtagtaggttaaagcttcatctttttcaccaacactatcatagagcaatgcaatattatttagtcgtatcccttccccagagcgatccccgggtaccgagctcg

SEQ ID NO: 10543 - DNA, 511 bp, Triticum aestivum
  Clone ID: uC-tsrow189102d04b1
cggagagtgctgaaatgagacatggtggatttcctccagagaaaaatgtcaacaacaacaattgagaagtgggaaatgccgccatcaaaacggcttatcttaaactactaacccaacggttagtctttgctcctgcgggaacaggagaaagcttgttagaactccagtcgctgatattcagccacagaagcggaggcaggccgagccctttgtcgggcccagtcacgaagcgcggtgacctgctctaccatagtgcgcgacaggggcaacgtcgatttgatcgctgcgataatgtcgagctggttaaattctctttcttgggcaaaggcttcgtacatagccgctacgatcgcctgctcaatctctgctccggaaaaaccgtcggaggtgcgggccaattcccccaggtcaaaacgggaagtgtctttgcgccgtttatggaggtgaatgcggaaaatggcttcccgctcttcggaagaaggtaggtcaacgaaaaaaatctcatcaaacc

SEQ ID NO: 10544 - DNA, 297 bp, Triticum aestivum
  Clone ID: uC-tsrow189102d06b1
ctgtttctttaatcagaccaaagttttccggtctaaagccagcttcaaactgggtttgttgattgtattttgccttgcttaactttgctccggttaagtctgcccccgtcagcaaggctccatgcaaacaggcatcttcaagattagccctggttaacaaagctccggcacaaagggcattgtttaaatgagctccctggaggttgactttaagcaaaaaagtttttattagagatgcttgccttaggtccgccttagctaaattcgcccccgacagatccccgggtaccgagctcg

SEQ ID NO: 10545 - DNA, 542 bp, Triticum aestivum
  Clone ID: uC-tsrow189102d07b1
caggtcgactctgaggatccggttgaagaaagtggatttacctgtattgggctgaccaataaaagctttctttccttgcacatctggacgactggactggactgaccccctttggcaatgactcaccatctccgccctactctcctaaggtaatctgcaccaattgggcttcactacggcgcatggccacttcggtggtgctaccaatgcggaggtggagtggtccccccaaaccagccttgcggagcaattgaattggcttatcaggaattattcccattgcttctaggcgattaactaacccctgaccgtggtttcctagtaaaattttctccacaaaagccaactgacccaccgataaatccaataacgtcatggttttcccaaaactgcaaataattctcaactattaagttagcattatctgttcagaataaatatcaaaaatcactggaataattgtgagtataatcacttaccattgattaaattccatgcaacctatggaaaagtcctgcccaagacagatgctgggagcattg

SEQ ID NO: 10546 - DNA, 479 bp, Triticum aestivum
  Clone ID: uC-tsrow189102d08b1
ggatcataatcgcagtgatgaaccgccatcctgagccgataccgttcctcctttaattaccccttcccctcgccaggcttgaggcattgcacccctcaccgttcacagacccaaccaacagcttgctttttttgtagggccaactgaggccagtcaggagaataacgggtatctttcatcccaaacccctagtatttttttagtcatcacttgaaacccctaataaaaactttggcactctgtctgaatcgaacttcgacaagctcctgacaatcagactcattaacccctagtaatttttattgcacattgctgccaaaaatcttagcaacattttaaacttccaagcgtctgcccttttagccattcgaaagtttacacagttaaacgtctaaacttttaaatattgaaccatgtaatgattatcaccgatactgcttttaaaggtggggtaggtaaaaccacaagctctattcacc

SEQ ID NO: 10547 - DNA, 211 bp, Triticum aestivum
  Clone ID: uC-tsrow189102d09b1
ctgcaggtcgactctagaggatcgccggagggattttgcaaggcattacccgcaatcctttggcagccccttaaattattggtgtcaatgcgggggctagtttggtggcggttaccttcatcgttttgctaccgggtatttctccttccttgctgccagtggccgctttttgcggtggtttaacagcggcgatccccgggtaccgagctcg

SEQ ID NO: 10548 - DNA, 498 bp, Triticum aestivum
  Clone ID: uC-tsrow189102d10b1
ctgcaggtcactctagaggatcgccgtgaccgtggtagtaatttgggcggcaaagggatgggacgcatcgacattgactgcaatgctatggcgttttagaaatttcggtatttcctgtggggttaaagctccaacgtgaaccgtcaaacattgatgaatcggatataaatgcttggcctccgatgtggtgactgtcaccagacaatttattccctgggcaattaacccttcggctacggcacgactatccaccgttccaccaattaaccaaacggttgccaggctatccaccatgatttaagtgcttacaactggaatttttcacccaagtaatattgccgcaccaaaggattttccgataactccccggcactaccggaagccaaaatttgcccgtcccgcataatgtaaccccggttggtaatggctagggtttcccgcacattatggtcggtgattaaaatgcccatatttcgttcccgcaactgggcaatgata

SEQ ID NO: 10549 - DNA, 461 bp, Triticum aestivum
  Clone ID: uC-tsrow189102d12b1
ttgccctagctcaagccaaattattagaacaagaaagggaaattcgtcaacaattaatagagcaaaataaagctttaatgacggccacaaaagccgcagaagatgccaaccgagccaaaagtgattttctggccaccatgagtcacgaaattcgcacccccatgaatgcagtgattggcatgaccgggttattgctagatacgcatctaaatacccaacagcaacaatttaccgaaaccatccgcagtagtggcgaagccttacttagtttaattaacgatattcttgacttttctaaaattgagtcgggacaatttaagttagaaatccatccctttgaaattcagcaatgtgtcgaagaatgcctggatttagttgcgccccaagcctttgcaaaaaaattggatttggtttatcaaatcgagccccaggtacctatggcgatattgggggatttaaca

SEQ ID NO: 10550 - DNA, 390 bp, Triticum aestivum
  Clone ID: uC-tsrow189102e01b1
gactctagaggatcacgctgggaatggaagcaatcagttccaccagaaaggcaatgggcacccgctccggtgcaggtagaaggttttcgctggtcataaccgccacggccagccccaagggcagggcaaaaattagggcgatgaaggaactaaccaccgagccgaaaatatagggtaagccgccaaacagttgcccactgctgtcccattgttgactgacgatgaattcccaaccaaacttggcgatcgccggtcgggcatcggtaaaaaccacccaggcgatccagccgagaatcaccactactgcgagggaacagagacgggtcaactgtttaaagccccagtccaaaccattggtgagggaattcccttgggtaatatcccctcccc

SEQ ID NO: 10551 - DNA, 489 bp, Triticum aestivum
  Clone ID: uC-tsrow189102e02b1
ggtcgactctagaggatcattaccgacgccctagtaggggaaggctcatccccccgccacaaggaatcccccgtttccactaaactcagacaacgagaagttgttacccccaaacgatgcaacgcctcagcggccaacacttcccttaccccacctttgagggttaggcggccatcaccgccccgggaatagggagtctggccagagcctttggtgccaaaatcgaataattccccgtttactccccgcacttggccgtagagaaaaccccgaccgtcacccaaattaggattatattcaccgaattggtaaccgtggtaacgcagagctaaaaatggccttaccccatggaataaaccgaaagcttcaacgaaattatcatccttaacctgacttggctccagacccaacatgggcaacaggcgatcgttacggaatctcagtttatgctcaggaaaagtcgctgctgacactgggtcaaaaaattca

SEQ ID NO: 10552 - DNA, 467 bp, Triticum aestivum
  Clone ID: uC-tsrow189102e03b1
caagtttacagcgactttaatatcattaacttcaccgccggtaacaccgttgctcagatggctggttggtttaaaaagccagtggaatccctagcggatttgcggggtttaaaaatgcggattcccggcttgggagggcaggtaatggctcaactaggggtcaacgtccaggtgattcctgggggagaactattcctagctctagaccggggcaccattgacgcagcggaatgggtagggccctacgacgacgaaaagttagggctaaataaggcggccaaatactattactatcccggttggtgggagccaggccccagcttggacgtattggtaaaccaaagccaatgggcgaaattgccgccggaataccaagctattttccaggaagcggcccgtagtgccaatctattgatgctatcccgttatgaaacttttaatagcattgccctgaaaacattactgga

SEQ ID NO: 10553 - DNA, 472 bp, Triticum aestivum
  unsure (1)..(472): unsure at all n locations
  Clone ID: uC-tsrow189102e04b1
aaccaaaaactgcggggcatcatctggtttcgcatggcctattacactccggtaattacctctattgtggtggcaggcattgcctggaaagccctctacgcttccaatggcatcctgaatcaaattcttgccctactgggatttagcgatggtattccttggctcaccagtcccaatttagccctgtggagtgtgatggtggtgacagtgtggaaagggttgggttattacatggtcatttacctggccggactccaagccattccccaggaactctatgaagccggggcgatcgacggagcggacggttggcgacaacattgggatattaccattcccctcatgcggccctattgtttcttagtaggagttttatcttccatttccgccctcaaagtttttgaagaggtgtatatcatgacccagggcggccccctcaacgcttncaaaacggtagtttattatgtctatg

SEQ ID NO: 10554 - DNA, 419 bp, Triticum aestivum
  Clone ID: uC-tsrow189102e05b1
gtgtctgccccacggggatcttgaccaatggccgtgctttcactttacaggtcgatggtcttgaagtagttgaggacattgaagcccgttaccttcagggaaccgccaacattttctggtgtgacagggcgatcgttcaccttagtaaactgatttgtcccatctacagcagagcgcacccgccaagtagctccactggaagcgttacctgcccactggtagctgagaacgccagtgaggttattgattgtgtcgcccatgcgaatatcactagcggtgctgaagctggaaccaaaaccatccagattgctaatttctgcgttctgcacactcaggccatcatcgtaggtaatggtgcgagcaccgatttcctctcggtatgccccatagcctgccacattagcatcattaaactgggt

SEQ ID NO: 10555 - DNA, 450 bp, Triticum aestivum
  Clone ID: uC-tsrow189102e06b1
cctggtgggcctgttgagttgcacttcggtgggcttaattagggataaaagctccaaataacggctctcagccgtctggtcccagggctgcagcaccatggtttgcactgataattcccctgtaaactcctgctgaaaggtttgaataccagtcaaaatttgctccaactcaatgccggcgatcggtcggttaattctttgtaactggtctggccacaatccgtctaatttgacagaaatcttgtctgctaaggagagctcttctcttacctgagcatcatttaacaaagtcgcattggtgagtaccagggttaatttcccagtcaactttttaatgccttcgagaatttcccctaaatttttggctaacgtcggctctccgctgccgcttaaggtaattacatccacctcccagggggcaaactgggccaattctcgcaaaatgtcagc

SEQ ID NO: 10556 - DNA, 583 bp, Triticum aestivum
  Clone ID: uC-tsrow189102e07b1
gcaggtcgactctagaggatcaaactagccgattccagcggttgggcaatgcgaatcaataaatcgtaaccctcggcgatcgcgtccacaaatcgatcctgcagagttaactgcacttccacttgggaatgtaaagccataaacttcgccaccagcggcgcaatgtacatggtgccaaaggtcatgggtgcattaactcgcaacagacccttcggttccccatggagttgggacactgacaattctgcttcctctaaatctgccaaaatttgcaccgatttttcataaaaggctatccctgtgggggtgggggtcactttacgggtactgcggtggagaagctgtactttaagctcattttctagggcaatcaccatcttattcaccgttgatcgccccagattcattttccgcgccgccgccgcaaaactgccctcccgcacaacttgggtaaaggcgtaaatactttcaagtttgtccattgatattcctattgtccctattttggatgcaatctgtgcttaaaatactatattgtctatattggggatgcaaactagaatgggaaccaaggtcacaaacc

SEQ ID NO: 10557 - DNA, 505 bp, Triticum aestivum
  Clone ID: uC-tsrow189102e08b1
cctgcaggtcgactctagaggaccacttttccccacgaatttttgcagttttgcgggattttgtcacaatctttttctaaaacttggattttacccggacttaaaagttaacctaactcaaaggatgtaactccgtaaattttatctagggcgatggagggggcttgcccagtgtacattcgagcagtttcaaaaactacctgcaggctatatttcgttgctagagtgatcgccgcttggttgggttctggcacatctaggtaaatggtattttccgctgtaggaattgcttttagagctaaaaagataatttccgctacctctggagtatcagcaaacagagggccaattttgtaacctactcggcaggggcgtagaacgccataaccccgtaaaatcccatcttcttggtaggcgatcgcctggtgccccgattgatgacaccatgttcgtaaaaattcttccctgggggcaggaaagcattgatccccgggtaccgagctcg

SEQ ID NO: 10558 - DNA, 209 bp, Triticum aestivum
  Clone ID: uC-tsrow189102e09b1
caggtcgactctagaggaccctgatgggaaaaatctgcccccactaagttaccccggttatagtctttggcttggctagggcttgcgaggctccccaaagcgaggataaaagtagcaactagaatgccagtccggactacgaactgccatcggccaagggactggggcttttccctctggaccctggcgatccccgggtaccgagctcg

SEQ ID NO: 10559 - DNA, 488 bp, Triticum aestivum
  Clone ID: uC-tsrow189102e10b1
gggagtcccggtctgttatttcatgctcgggagcaaatgcttagctttacagcggaactgcggcaaaagttaatgcaaccaccaactagtcctctagcagcctttgatttggccaagatggtggatggcaacttggataacagtgcccaactctggttagtggactatctccagtatcactattggcatggccaccaccaacggccatggttagaaattctggaaaaagcccgtaaatacctggccgcctacgttcaacctcggctagtgtgggaaacgactttcctcgccctttatcgtttagaaaactctggcgatcgccgataattccccaataactagccccaagattgttcttgctgaacggttccaatgctaagcctgcctgacaatggggacaaaacaggcgcaaaaggggcttagtcggacaaaacggtatcctatgctacataattttttcttaacctactcgtagtatggggtcttat

SEQ ID NO: 10560 - DNA, 461 bp, Triticum aestivum
  Clone ID: uC-tsrow189102e11b1
cgacttaatctcaatttggggggttagttgttttgtttcagcggattctaaccattgggggagattttctggcgtaatagtttgtagattctctaacagcaaaacgctggaccgaaataaactctctatatccacttcccgatggtcagggcgaaaacccttcaagcggcggataccctgccccagtaaagtcactgctccccgccaattgtgattgccaagatgatagtgggctacggcaatttgcaaaataccttggtagaaatttttctccgacgggttagcctctagccacactgcttcgagggtgttatggcaggcgtaaaaatcttgccggttaaattgttcgatgcctaggcttaggccgatattttcgtccatggttaatggatgcactgtcgatatgtcgatagaggggagggtcaatattaggtcagttgggatggagccgaggtaatttt

SEQ ID NO: 10561 - DNA, 338 bp, Triticum aestivum
  Clone ID: uC-tsrow189102e12b1
tttttcccctgaagattgtcaagggtactgcgaacatgtaagcgaagcatttgacccagctgactactctgtattagggggggattgatgcaaccctgctgatgttgtaggagccgcctataacgatgcccaaggcgtaacggcggaatttaatttaaatatgttgcgccatttaaattggcgttttcaaggtaattttgcgttggataactcatgccatacggctgatttgaatcagcagaaatcccaaattgaaatgtatttactcagtggcacgaagcatacggcgcgggtggaaaatcttgatttaacggtggatctgcaagctggagaaacca

SEQ ID NO: 10562 - DNA, 180 bp, Triticum aestivum
  Clone ID: uC-tsrow189102f01b1
atccaatccaagccaatcctgcataaaagagttgcaagcgagattgtaggtggcatttgttatcggatacaagaatgttcggtttagcagctgtgatgctggcatttaactgcaccatgaatgcggtaattttatcggctcgccagcgaatccaggccggatccccgggtaccgagctcg

SEQ ID NO: 10563 - DNA, 328 bp, Triticum aestivum
  Clone ID: uC-tsrow189102f02b1
atcgccggtaggccggccgcattggcgggggggcagggggcaatccattcaatatttttttgcaccacgtcggggggcgatagatgggtccattccccgatttttgggggccgatgattaaaaacgggcaaaattagggcgtcatactgttccataaagccgacaatttggcgggaaatcacctgcatattccttaccccccgcagatagtcccccgcagtgccactggtttcccctaaccactgattaaccgattccaacaggggtaaaggaatgccggaagcccccaccccagctttccaaatttgggcaaagggttcaattaaac

SEQ ID NO: 10564 - DNA, 516 bp, Triticum aestivum
  Clone ID: uC-tsrow189102f04b1
aatcgccgtttgccagggttggggtaagggcgcttttttcctttccggtagggcaatgcagacatggtgggtttgggcccgggccagcagttgggcagactcggcttggctaatctcataatcacagcaaaaacgatgggcactagcctgggtaatggtcaagttcaccaacaggcgatcgccgcagtgggcaggggcgaaaaaatcaatgctggcatggactaagggcaaggcaaaatccccgacactaatgatattttgtagggataaatgttctgatgacagccaactttcataggcttcatggcacatttgcaaaaattggttgaaataaaccaccccagctacgtgcgtgtccgccaggtaaacttgcctttcataggtaaatgtccccatagtgccccccagttaaccgaccactatcccttgaactactccacctgttctggaactggccacacaaatccacagtcaatcagcctggaaatcagcaacaatggtcaaaaatattaagaa

SEQ ID NO: 10565 - DNA, 364 bp, Triticum aestivum
  Clone ID: uC-tsrow189102f07b1
caggtcgactctagaggatcgccatcgttttggttcttctaattgcggtggtgctattacggggcaatcaatttcccctgatggtaacgcaatacagttggcgcaacaccaacatcggggcccaaacccaggccctgaccatgacttttaaccatcccgttgacccggacgtaatggagtcaggcttggtaattgacccacccctggcgggcaaaaccatttggcaggggcggcgttggttctacaccctaacggacatcccccgttatggcactaactatcaattgaccttacctttacctgccatggtgcggggtccaaggggacaggatttcaccagtctgatccccgggtaccgagctcg

SEQ ID NO: 10566 - DNA, 458 bp, Triticum aestivum
  Clone ID: uC-tsrow189102f08b1
tgcaggtcgactctagaggatcgtctccaaaaagttgctccgtttgaaggcgaactttaccgctaccttaatttcaatgagattgataatttcgaggacttcggccgagtcattcccctagaccaaatgcccaagattgaggatattttgggaatgccagtgggagctaagtaagccgtaaaattatggtgggccttttatggctcaccttaattttgactattcatttaattcaccccttatcatcaccgaagcagaatattttattaccaggaaaggattttatttcgtcttgaaacaaagcttctccaaagcatagacacaatcactgtattggggagactgaagattttctgtgtagtccttaagtctggctcaaattttctaactatcccaattttaaatggacaacgcgacaatcactgcaattgctacaggactactagtcgtggtcggga

SEQ ID NO: 10567 - DNA, 446 bp, Triticum aestivum
  Clone ID: uC-tsrow189102f09b1
tgacaacccaccttgtctttgaccaaatgcctttcgacataaatggcttcataggctaaatccaaaggacggataaattcccctttaaaagagtgcagagcctggagcaaggaaaccgtaaaagcagaggaagaccccagaccggtaaaagctggtaaatccgccacgttatgaagctcaatatctttttctaaaccacagaatttcaagcattcccgaaaaaccacgtgctccatttcgctaggatttttaaccaattccactttgcggtaggaaacgcgaatggaatagtcaaataaatgactcagaaaaggactagcagtaacgtaggaaaatttgtcgattgccgtagctagaaccgcaccaccatgctggagaaaatactcaggataatcggttcccccaccaaaaaaactaatgcggacaggggcacgggaaatcagcat

SEQ ID NO: 10568 - DNA, 183 bp, Triticum aestivum
  Clone ID: uC-tsrow189102f10b1
ggtggaagttaatgccaagttggatttggcccaggaaacattccaaagttttcgccatttaccttttgctcaacgggggcaatggttaagaaaggcggcggatatcctcgaacaacggcgggatgaatgggccgccctgatgaccctggaaatgggcaaatcgatccccgggtaccgagctcg

SEQ ID NO: 10569 - DNA, 367 bp, Triticum aestivum
  Clone ID: uC-tsrow189102f11b1
gtaactcatctgctgatttactagggtaaggaggggcaatcgtaatcaaaactcggtaaacggtaccggggaacaaatcatgaaacatctggagcatggggtcaagactaatggcatccggcacgcagggcagaattgttagatgggcctcttggctaatttctttgagttcattactatcgggccgggcgggggtgtccaaaaccaaaaaatcattcccggcaatatgggctggagcagacttttcatttttgaccttaaataagggttgtttttccccacgggcggcccatttctccaccgaacggttagggtcagagtcgattagcaacacttttcccttgtcggctaagtaacgggcaatgtg

SEQ ID NO: 10570 - DNA, 65 bp, Triticum aestivum
  Clone ID: uC-tsrow189102f12b1
actaatcaacccgtgaccgctgactttgaccggactacaaaaagggggaagggttagggaagggg

SEQ ID NO: 10571 - DNA, 263 bp, Triticum aestivum
  Clone ID: uC-tsrow189102g01b1
tcggtgcaactgcaacaggcaaaagttggtttatcgacaagggcggcagaaaatttaaccatagccgaagtgtcggaaccagaaatggtattaaaaattctcaaagcctctgcccgctctgtgcccaacgatagtctgaattactacggtgctggccatgtcaacgccggggaagccgtcaaacaggcccaacaaggagagatttccttccgggatttcatgcgttggttgcgggataacggttatctcaatcccatcttttg

SEQ ID NO: 10572 - DNA, 309 bp, Triticum aestivum
  Clone ID: uC-tsrow189102g02b1
atcttctttataacttcccacgtcgtaattttgcttaggctacagcaaaaaaaggcgatcgccacagtcaatgacgacagacaggtccaaactcaaaataaaatttcaatactaaacaactttattaatctttacagttttcctgagttggtggaactatcattgttttaccaagatcccaacttgattatagagtttatgtttttacagtcctggaaaagcttagagggaacccatttgaaggacaagtacttacttgaaaccttgcttgggattggtgggttcggcgcagtgtttctgtcaaaaaca

SEQ ID NO: 10573 - DNA, 360 bp, Triticum aestivum
  Clone ID: uC-tsrow189102g03b1
gatcgccacccacggcttggataatttccaccacttcggcgatcgcctctgggagattaatgcccagcaaagccaaaatttccgacggcagatcctccaggtgggaaccgagccttataggggacttataagaggaacttcccagttcagttgtatccagtaatgccttggtaaccttggtgagggtagctcccccattggtcaacacatcggtcacattgcgacgactgcaacctaacttctcggcaatggcactgccggtggtgaagccagaacggatcgcctcgacaatatgccagcgggcaatctgggaacgatcgccagcgtggggagtaatttcaaaaccatggaggcaaacat

SEQ ID NO: 10574 - DNA, 572 bp, Triticum aestivum
  Clone ID: uC-tsrow189102g04b1
agaggatctgtgcattctaaaatgttgttttgattttgacaaaattacggaaaagtttaaaattccaccgaaattgttccccttaccgttaggggcgccgcaggatcaacgcgagtccggcgttgggtcgcttcgatgtaatctatattgaaaagattgttaacgttaatggcggccctccagttattgcggcggtaaaatacgcttatatcagtacgtagatagctcggtatttgaaaagaattatttaaatcaccttggcgttcccccacataaaacaatcccaggccaaatcccaaaccctgtaaatcaccggcttgaatttcgtaagttgaccacaaactggccgagttaaagggaaccccctcaagcaaattaccaggctccagattgtcatccttggtgaccctggcatcggtataagcataggaagcaataatattccagcccggtaggatttcccccgcgatatcgaattcaacccccttacttctttgctctccggatggaatggagaagttgggattttcagggtctgttacagccagattacttactgtgatttcatatgc

SEQ ID NO: 10575 - DNA, 500 bp, Triticum aestivum
  Clone ID: uC-tsrow189102g06b1
taactaaaattaccaccgtttccatgtttgtactacactagaataagcttcgcagaagcttaagaggaactagttcctttgctaaggtgatgagggctctcttccctcgcatcgagattgagccttgagggggtgagcagaggaatatactccacagggtaatctcatcatgctggcactattcccccataccctgtgaaatgctaatgctccctttcagagcagagggcgatgtttccctatccctactttgcagtcggggggaaggggagcagacaatgagattatcggggtccctctgattcttgctgttccccatgggcttttctcaataaccttagtccggcttctttcggggtgccgtccccattgacgtaggagtagagggtggcggtgctgatattgagcttctgggctactgccttggcacaggcttctgggttcttcatcgcttccattaacatctggagcattaccctatccatcttccttggtctacc

SEQ ID NO: 10576 - DNA, 309 bp, Triticum aestivum
  Clone ID: uC-tsrow189102g07b1
caggtcgactctagaggatctttaactggagcgacaaacgtagccatggttaattgtctccgtcacaatttttcgagcttaatagtttggggtcagatgattagggggattgcaccgaaaaacttatgttaatcggtatatttccgtatgctaacgacgtttagcggcaacctggggggtcatgccaccgattaagcgctgtagctcgtccggcttaccactcttagctaaaccttcttccagggaaattacccccgacaccaccaacgtggccaggccctgttccatggtctgcatacctagttttgc

SEQ ID NO: 10577 - DNA, 208 bp, Triticum aestivum
  Clone ID: uC-tsrow189102g08b1
ggatcgccgtctgacgattaacttacctcccaggagttggaagagatttttgtgtcatttcccaatttaaactcaggcaaccggtttggggctggaacatcaacaattcccccagagccctgacgggattggcttggtgtactgactgggtatggaactgcacttttaactggtcaccggcagtggtgatccccgggtaccgagctcg

SEQ ID NO: 10578 - DNA, 404 bp, Triticum aestivum
  Clone ID: uC-tsrow189102g09b1
tgcaggtcgactctagaggatcatcgggacagttatgaagatttagtgcattttgtcgaaatcgtggcaaacgctggctgtcaaagattcactgtccatgcccgtaaagcctggctccaggggcttagtcccaaggaaaaccgaaccattcctcccctacgttacgaagatgtttatcaattaaaaaaggattttccccagttattgatcgaaattaatggcggtatcacccaaactgagcaaattcaacagcatcttagccatgtggatgcagtgatggtgggccgagccgcctacgaaaatccctaccttttcgccaccgtagaccgggacatttaccacaaaaccaatttagtccccagccgagcggaaattattgaacgtatgttgccctatgtggaaga

SEQ ID NO: 10579 - DNA, 454 bp, Triticum aestivum
  Clone ID: uC-tsrow189102g10b1
gtcatcattgctttgggcattcaaccccattggttaacccagtggagtgagccccaaacggcggttttgttgacagggcacccagatttagtcagtgtgccagccccgccccgcatcgaaattgaagtcaaggaattgggggaagtgtagggctccagcaaaccgaagtgagtttaacccacaatgatagaagagcaataattccctgatcgccagagcttttccgtatatcatccgcaaaagtgtgttacgccgattagcatacccttaaatgaactatatgttccccatgttcccccggaaagttcttggatgtagtacgagcaactattcgtctcaagaactactcctagcgcactgttggaatcaatttctcccaaaaagcagggaattagcctaaacaatttgggagtagtatcttggctataactttctaagccacgtcgtcatgggc

SEQ ID NO: 10580 - DNA, 508 bp, Triticum aestivum
  Clone ID: uC-tsrow189102g11b1
aggatcaacaggggataattggtctttcctcggccatggtcaaggccaacatcttctaaacctaggaaaaatcgcccgttaccgattctaccccagcagagagcgcaaatcctttgttatcaagagctaatccttggcaccaggggaatctgccgcaacttaatgccgggaatggtgaactgttgttcgatctgatttggctctaggggaatcgtctcagtaaacttggactggcttgtggataacacccccaacacactcaggggcacctgcaaaaataaattggccatcaaataggcgatcgccgctagcccaacccctgccaaacgaatctggggcaaatccgtcacccaaggataggcgatcggagcgtagtaatacaccagccacaatagacccagactaattattcccccaaacaaagtaatccatcgttgttggctccgtttaaacaaacttaaaattcgcagttggtcttcccccaaactatcctggcgcagagcaatga

SEQ ID NO: 10581 - DNA, 468 bp, Triticum aestivum
  Clone ID: uC-tsrow189102g12b1
gatcccgactttgccgaatgactaaagtccccgccagtaaatctccaatgcgtttttcccgccggccaaaaatgattaataaagcgccgatgtaaagaaaatcatcaatggggcggaacagagctcttaaactagcttcctgtaagccaacggggcggccatctccccgaattacccgaattttagccctgcgtttaccgggggtttgaccctgccagagggtttcaaaaaagacaaaataacccacataaaccgcaaaaatgaggaaaatttggatagcggtgagccagagttgccattccccggaggcgtagagggaaaggttataggccaacaccgcccaaataattagcaaaattaaaacaacgcttcccagacagacatagtcgatcagcaccgcatagagacgattgccgatgcccgccaaagtaaattccaattctacgctttcgggggtttccacctgat

SEQ ID NO: 10582 - DNA, 237 bp, Triticum aestivum
  Clone ID: uC-tsrow189102h01b1
agtgctgaatttgccccggaagcggaagggctgaatgtctggttattgacgggggttaatggagccggcataaccaccaccatcggtaagttggcctttatggccaaacaatccggttatgactgtgtgattgcggcggcggatacttttcgggcggcggcggtggaacaggtgaaagtttggggggaaaggagtggcgttcccgtcattgctaaccctgggcaaaatactgacccg

SEQ ID NO: 10583 - DNA, 108 bp, Triticum aestivum
  Clone ID: uC-tsrow189102h03b1
aattgatggggccgtttttgtttgctcacctgggcaattaaatccggtaccggagccaacggcaaactgtcgggtaaatcctgtttagctattttggctgtccatgtt

SEQ ID NO: 10584 - DNA, 414 bp, Triticum aestivum
  Clone ID: uC-tsrow189102h04b1
gggagccgtcaagcacacttaaaagaagttccgggttgtaattaatacggcctatggcctggccagagcccacgccgtgaatagaaaaaaacaactcatcaacaatcttgtaaggcactgcttcatatggccattggtgatggagtaaaacctggtgaccgggtttaagcctcatgcgaacctgggagtgaatgcctaaacgacctaatactggtacatccgcctcaacaacttgaaaaatcatgtctgcaattgaatcgcgagaaaagaccgcaatggcaaaaccatctaagtcccgcacattggcaataacaacctgattttcagttggttttaatcccaaaaaattcagctcccctggcgttattcctataacgggcctgaagtgctcaacattcacacactgtccagcgt

SEQ ID NO: 10585 - DNA, 385 bp, Triticum aestivum
  Clone ID: uC-tsrow189102h05b1
attcattgccgatagtgataacctccctttggaatttattctttgtcagagtgctcccaacaaatagggaaaattatatttttcgccatcaaagattaaatttaagtcaattaatcgcccttactctgctcaccttactgctaagcctaggttttgcccaagcccagtcggcacaaactctccttagtcaactaccgccccaaattgacctagtggatcccgtcaagtctgatttccccctgcaaaataaagcttttaatctaggctttgaatcagatttatccggtagaattggtaacttggattacaccaccgttagggtagatggagagccaatttttttgattgctgtgcccacaggaaatgctagtaaagaaggagattc

SEQ ID NO: 10586 - DNA, 468 bp, Triticum aestivum
  Clone ID: uC-tsrow189102h06b1
gtcggggccagtgctctgctgggagctggtttaccctttagctttggtttgggaatgattgccctgagggttttcctaatcgtgttgggggtaacggccctaagtttaggtttagcctttgccctgccgggccacattgaattgattgcggtaatttttgtcactaatttacccctactcttcgccagtactgcccttgctcctttggacttcatggcccattggttgcaggtggtggccagtttaaatccattaacctatgccatcgaaccaatccgttacatttacctgaatggcaactggggtttggatagtacggttttgactgccccttggttcagtttgaatttcgcccaggtattgggggtgttagttttgtttgatggtttagtattgttattaatccaacctttgctcaaacgtcgctttttgtgattttgtctgttgatcatagctgatccccgggta

SEQ ID NO: 10587 - DNA, 220 bp, Triticum aestivum
  Clone ID: uC-tsrow189102h07b1
ccaaccaaccaatagaaagcaccaaatcagtgcgttagattgcggtaattgccaagacaaaggtgagcatttgtccgcctacaaattcttttctaaattaggagcaaaggacaagctgcaactacacacctgggcagcattgggattggtgaaacgaaatcctccccccattaaatcctcggcatagtctaatttgagattgtggaggtaacctgcactc

SEQ ID NO: 10588 - DNA, 273 bp, Triticum aestivum
  Clone ID: uC-tsrow189102h08b1
ttgggagaaagattattgttgccggaacgtttaatggttctttcgcagggaaaaggaaaggctcagcgggaggggtttctagtcagtatccgcccatcctacattggcgatcgccgccgggttgttcggaacatcccagcaaaaaagcctccagccctcgataatccgctaacctgaaattaggtacttctcccccatttacccaaggcgttaaagcattcaggggttgattttttaaggttatgcaaacaaccagtgacgttctcattattg

SEQ ID NO: 10589 - DNA, 294 bp, Triticum aestivum
  Clone ID: uC-tsrow189102h09b1
acctagttcgataatgctttggagaattacctgatttttttccctagtcaaaaggtcatctaagaacgacttatgaatttttaaagtctggagaggtaaatccttgagataggagagggaagaatagccgacaccaaaatcatcaatggcgatttgtatgcccatttcatttagttgattgaggcgattaatggtttcccctggttcatagagcataagactttctgtcacttccagggtaatttgctggtaacttatttgagtctgagcaacaatactttctatctcgcttac

SEQ ID NO: 10590 - DNA, 410 bp, Triticum aestivum
  Clone ID: uC-tsrow189102h10b1
ttgatggcaaaaatcataaaactgttgctgtttctttcccctacaactgctttccacctgccccaaagttaaattgctagcctgagctttaatagcggattgtaaagtttgtaagtaagtttttaagccttggtaatcccctacatcattgttgaatgaatagcggattttagcaaaaacaagaaattcattactgctaaatttgtcgttgtcaatactgatagcttttttagcctgcttttctaactccaccaaagctttgttatagagaaataaatcactttcagaaaccttaggtttagctttgccaaacttttctaaaatttgataatagactccctcttgccccatcaatttttcccgtaaatttgaccaagtattcagagattgcaggcaccataccaacacca

SEQ ID NO: 10591 - DNA, 302 bp, Triticum aestivum
  Clone ID: uC-tsrow189102h11b1
aggatcatggtctaagcactccgcatggtttgccagagttgcttatattggttgtacggtggcaatgtccaggggcgcgagaaatggacaacgctccagtaactccggtgaaaaagccaataaagggttagtgctcagggcggaaacctccaggttttgatagggcaccgccagggcattactgaaagttgccatctgctctagactggaaggctgggcggaaaaatttaaccattcataggtaatttcagccgcctccatctcagcgggcatagtccagagatccccgggtaccgagctcg

SEQ ID NO: 10592 - DNA, 495 bp, Triticum aestivum
  Clone ID: uC-tsrow189102h12b1
taactacgggtgaaatgaaaaagcgtgcaacttccgtgtcaaagtcccggaaatttccccccccctcataagccgcatttaatcgataaagagctgttcgttgtgagtttaacggccctgacaagtcaatggttggacgcaccagaccaaaattacctgcctgcatagcaacttcataaaaaggttctgaaaggggctgtttggtaatgtaattaataacgccgccaggatctaaattgccgtagagtacggaagccggccctttgaggacttctatccgttgtagatttgccgtgtccggaatagaaaaattatctctgaacttaaagccgtcccggagagttccgccaaattgttgaaaaccgcgaatattaaatatttcggatgtaccaccaacagtatttgctctctgcacaccactgacattttgcagtgcttccgaagcacgaattatttgcctgtcctccaacacctgttggggtaccacttgaatcg

SEQ ID NO: 10593 - DNA, 65 bp, Triticum aestivum
  Clone ID: uC-tsrow189103a04b1
ttggctttacctagcattcagcatcctctttatttgcctgaggatattcttgttcttcttcccaa

SEQ ID NO: 10594 - DNA, 360 bp, Triticum aestivum
  Clone ID: uC-tsrow189103a05b1
tcgacttcgcgaaggcaaagatccaggacaaggagggcatccctccggaccagcagcgcctcatcttcgctggcaagcagcttgaggatggtcgcaccctcgctgactacaacatacagaaggagcccaccctacacctggtgctccgcctgcgtggtggcatgcagatcttcgtcaagaccctcactggcaagaccatcacccttgaggtcgagtcctgtgacacgatcgacaacgtcaaggcgaagatccaggacaaggagggcatgccccctgaccagcagcgcctcatctttgccggcaagcagcttgaggacggccgcacccttgctgactacaacatccagaaggagtccaccc

SEQ ID NO: 10595 - DNA, 229 bp, Triticum aestivum
  Clone ID: uC-tsrow189103a09b1
tcgatcaacatcggcaatgcgcgctcggttcacctgcaggaggacctggggctgacgggcgtgcaatacaacacggcgtctaccgtcttcttcgtcccgtactgcatattcgagatcccatccaacatcttcctcaagaggttctcgccgaggatatggctgagcatgtgcggcttgagattcggtgccgtcaccgtgttcatgggactgtgccagaacttttcgggat

SEQ ID NO: 10596 - DNA, 192 bp, Triticum aestivum
  Clone ID: uC-tsrow189103a11b1
tcgcttactgttgattcatctcttttgtgctgcttggcaatcccatttgtttggtcattgctgtttgattttcggcctgatgacaattccatcaaatcggctctggcttgtattgatgcccccttgattctttctgatggaaatcaacttttactcatttcgactgacctgaatttcctttctttgacttct

SEQ ID NO: 10597 - DNA, 233 bp, Triticum aestivum
  Clone ID: uC-tsrow189103a12b1
tcgcccacgcgtgcgccacgcgtccgtggtcatacacccgctccgccccgctctgatcaccctcgcaccctgttcctcctgcgcgcgctgcagctctcgccctccgcggatgggctccgccctctgcgcgccggtgggctccgccgtcgccgccgcccggtgcaaggtgttcggaggaggaaggaacgatgggagggccgggtgccgcgtcggggccgcgaggaagaatactg

SEQ ID NO: 10598 - DNA, 375 bp, Triticum aestivum
  Clone ID: uC-tsrow189103b01b1
ttgatttctgcaaccaacagccgatcaactagcagaggcactgcgagctcgccaggcttccagagcgtacaaggcgaccgatcgatcgatcgaccgaccggcaagcaatggcggcgacagggagccctaagggcctacggttcgctgcagcgtgcggcgttctcagccgctgcatcaaggcggcggagacgcggccggcggccacggtggtcctccccctcatgcctggagcggaagtgcccgcgcaagacgaccacgaggcgggtcctgcgccggcgaacgcgcagatgaccatcttctacggcgggcaggtgctggtgctggacgaggtcccggctgacagggcggccgagctgctccgcgtcgctggtgtct

SEQ ID NO: 10599 - DNA, 452 bp, Triticum aestivum
  Clone ID: uC-tsrow189103b02b1
ttcctctccacggaccggaacgcgccatgacgagctcctccacgccgtcccgcaaggcgctgagcaagatcgcctgcaaccggctgcagaaggagctcgccgagtggcaggtcggcccgcccgccggcttcaagtacaaggtctccgacaacctccagagatgggtgatcgaggtgggcggggcggagggcacgctctacgccggcgagacgtaccagctgcaggtcgacttccccgagcattaccccatggaggcacctcaggtcattttcctcaacccggcgccgatgcacccgcacatttacagcaacgggcacatctgcttagatatactgtatgactcgtggtcgcctgcgatgactgtaagttcagtctgtatcagcatcttgtcgatgctgtctagctcgccagcaaagcaacgcccggcggacaatgaccgctacgttaggaac

SEQ ID NO: 10600 - DNA, 169 bp, Triticum aestivum
  Clone ID: uC-tsrow189103b04b1
tcggtctcgccccccgccgacgccgccgtccattgcttggagagacagcgtgtaggcgccggacgagcaggccacctgcgtaaccgatatccagctagcgagcctaacaaacaccgccggttggagaggactagctgctgctcgagagagagagatgtcgaccggacgg

SEQ ID NO: 10601 - DNA, 385 bp, Triticum aestivum
  Clone ID: uC-tsrow189103b07b1
tgtcgttgcccacgcgtccgcaatctctagcgtgttgcaaatttggagagctagagcaacctgcagtccacgaaacagatcagaataagcttccagccatgaggttccccattttagtgtttgtgtgggctgcggcggtgctgctcgccgtggccgccttctcggcggtggcggacgcgtcgcctcggccgtcaaagtctttgaaggtcgggttctacaagcacacatgcccacaggccgagtacatcgtgcgtgacgccgtccgccgcgccgtctcccgcaacccatgcctcgccggtggcatcatccgcatgcatttccatgattgcttcgtcaggggttgcgatggctcgctgctgatcaactcgacacctgggaactcggc

SEQ ID NO: 10602 - DNA, 373 bp, Triticum aestivum
  Clone ID: uC-tsrow189103b11b1
cggacgcgtgggttggacaggagcacaggctgtcgataccctcctttggagtgcagcggtaaatccacattacgcttttctatctgggggttttcgaactatgccacccgtcacgtatttgacacccaacttccgtttttggaggggatcaatcgtatacaaattccgattcatcaaaacggcctttcataaaggtcgtgttttgatttcgtacgatcccaacggtgatattacgggtacatcagataccgagaccacaactttttcgcgagtagtggatttggagcaggaaactgaagtagaatttgcagtcccctacatggcaacatcgcctatgttggagattgttgattttgcctcttttccccttacc

SEQ ID NO: 10603 - DNA, 303 bp, Triticum aestivum
  Clone ID: uC-tsrow189103b12b1
tcgcggacgcgtgggtgaaccctgttctcttgcggcccagcatccgcggctgttgcgagctcctaaagccgcgacccccgacgccataatccctcaacgatccccagagcagagccatcctctctctctccccgcgagccctcacaagcgagaggaaagagaccagagatgggcggcggcaactgcaaccccaaggacttcggcgccgccgcctactgggacgcccgctactcctctccctccactggcggcaagggcggccgctgctgcgggttcttcgactggtaccagtcgtactcggcg

SEQ ID NO: 10604 - DNA, 473 bp, Triticum aestivum
  Clone ID: uC-tsrow189103c01b1
ttggtctccttcggctccggcgacagcgaccgcgaccggcgaccggcggcgggcgtccctcccttgcaggtgtacaggacagagtaaataggcagggtcgtgcaaaaggagaggaaagtgcgcatccatttgattgaatggcttcaaagattcaagccttcttgaaccatcccgctggccccaaaaccattcatttttgggctccaacatttaaatgggggatcagcattgcgaacattgctgactttgctaagcctccagaaaagatatcctatcctcagcaaattgcggttgcctgcactggagtcgtctggtcacgctacagcatggttatcacaccgaaaaactggaaccttttcagcgtcaacgttgcgatggcaggcacaggcctgtaccagctttcccgtaaaataaggaaagattatttctccgatgatggaaaggaggtggctgctgcatcactggaaggatag

SEQ ID NO: 10605 - DNA, 263 bp, Triticum aestivum
  Clone ID: uC-tsrow189103c02b1
tcgcggacgcgtgggcgcgtgccgacctcagcaacgatgggcacgggcacgggcacggcactagggccggccatggccgccgccgcctccagcacggcccaccggcctgggccgctgcctgccgcggcgaccgcgaatcgcagcgccagtcgccccaccgcctgcgcgccgcccgggagaacgctggtctgctccgctccccggcagtctgaggcctgcgcggcgcgccgtcgcgaccacggtccgggcggcggaggccgggg

SEQ ID NO: 10606 - DNA, 422 bp, Triticum aestivum
  Clone ID: uC-tsrow189103c03b1
tcgctgtcgcgtggctggacctgaaggcccttttgatgtcgatgtctttgactctgctacagattacatcaagctaatgaagacaatctttgacttcgagtctattaaaaagcttctggcatctccaaagttctcgttctgttttgatggtcttcacggcgttgctggagcttatgcaaagcgcatgtttgtggatgagctcggcgccagtgaaagctcactgttgaactgtgttccaaaggaagactttggaggtggtcatccagaccctaacctcacctacgcaaaagaactggttgatcggatgggtcttgggaaaacctcaaatgttgaaccccctgaatttggtgccgcagctgatggggatgctgaccgcaacatggctcttggtaaaagattcttcgtgacaccatcagattcgg

SEQ ID NO: 10607 - DNA, 303 bp, Triticum aestivum
  Clone ID: uC-tsrow189103c04b1
cggtcgcgtggctggacctgaaggcccttttgatgtcgatgtctttgactctgctacagattacatcaagctaatgaagacaatctttgacttcgagtctattaaaaagcttctggcatctccaaagttctcgttctgctttgatggccttcacggtgttgctggagcttatgcaaagcgcatgtttgtggatgagctcggcgccagtgaaagctcactgttgaactgtgttccacaggaagactttggaggtggtcatccagaccctaacctcacctacgcaaaagaactggttgatcggat

SEQ ID NO: 10608 - DNA, 302 bp, Triticum aestivum
  Clone ID: uC-tsrow189103c05b1
ttgtggtgttccctgaaccttggtgcatgcctagtctgttcaccgccgagattgcagctttctacgagagttattatactaacaaaggagtcaagatcttgaagggtacaattgctgctggttttgatgctgacgctaatggtgatgtcaccgcagttaagctaaaggacggcagtgtgctcgaagctgatattgttgtcgtcggtgttgggggcagaccgttgactactctcttcaaaggccaagttgccgaggagaaaggtggaatcaagaccgatgcttttttcgaaacaagtgtcccc

SEQ ID NO: 10609 - DNA, 345 bp, Triticum aestivum
  Clone ID: uC-tsrow189103c06b1
ttgcgtgtcgcgtggggcctcctccctggcctggttctggttgaacaagctccttccttgttcgagtctcaagcacattagttcaaggaggaattatgaagctcagctaccaccaacaccgacaccatcaattcatctcctttccttgacctgatcgcctcctaccacatgcacattgtagacctacatattccggtcctgggagaggtggcgacaccagtctgagctgagggaagccagccacgcctcactggcgtgttctgaccagcgctagcaccaggcttgaccagtccgctcagaaatcaacaagaacagcctaccttcttcatcttcttcttcttcttc

SEQ ID NO: 10610 - DNA, 244 bp, Triticum aestivum
  Clone ID: uC-tsrow189103c07b1
tgtcgttcgcaacaaccggccctccacagggggacctgctgctcctgctcccaacactcctccttccccccgccggcggtcacaggcaccctacggcactctgccggtgctcttatcttgtcctacgcgtcgccagatcggaagccgagggccaggcataaccgccggccaagggagaggacaggacagaatagcttcccccgtgccgagatctgccggccagatctgacctcggagggaggac

SEQ ID NO: 10611 - DNA, 372 bp, Triticum aestivum
  Clone ID: uC-tsrow189103c10b1
ttcgttcggcagggtaaatacaatggaaggaaaggactctagagaaaggatatcaaaggcagaaccaaagcatcaacattctcatttagagaagagtgacagtgtaccaaaacctgcagaaaagccatccccagtttctgccgaggtgtcaggaaaagagacacctagggttcagagaaccaaagagaagggaggtatagcagaaaaggaaagagagaagaaggacaaagaggcttctcgaagactggaagaggcaaaagaaaggcaaaagatattggagaaagaaagagaaaatgccgaagtcagtgaaaggaaaaaattggaagaggaggaaagggagagggaaaaggaaagggtaaaggataagcttgc

SEQ ID NO: 10612 - DNA, 323 bp, Triticum aestivum
  Clone ID: uC-tsrow189103c11b1
tctcgttcgcacccatcgtcacctctcttgcagcttcaaactttcagcgccagtaccaacctgctgcacattcttatacctttgagttagcttacaggaggttgcactgcgggcaggcggtcagggtgatcgatgatgatgaaggttagcccaagggtcagcgttcacgtttgcttgtgcagcactagacatgggaaggagtgcccccattacaacaataaaagaggggacagcgccacagccgattcaccagagaaaatgaagccggagcaggccgcccacaacaagatgaccactgcgacgtcctccccgtcccctgtcgt

SEQ ID NO: 10613 - DNA, 326 bp, Triticum aestivum
  Clone ID: uC-tsrow189103c12b1
ttgcccacgcgtccgtttcactgcaaagaccaaaggatcttatggtgttgacactggcaacctattctttgctgaagtcgcatatacgcgaggagatgatggattaacggtgaacagttgctgtatacttgaaccttcttctgatcatggcctctgctatggttgttgtggtgatgtgaagcaccccaacgatggtaatgcatatgcttgtggtcggcggaacatatcgtattgttttcagaacggtgcacctgatctacctctggactatttcgtggaccgctattacgaggactctgatgaagaggcggaaagactgagatctc

SEQ ID NO: 10614 - DNA, 448 bp, Triticum aestivum
  Clone ID: uC-tsrow189103d01b1
ttgcccacgcgtccgcggacgcgtgggctgaccggtggactccgtgtgggcggagcgaagtgggagccaacgccaagccagccgagcggactcctctcctcctcgcagcagttcgcgattcgcccccaaatccagcgccctccccgccggaatccggcgccgaatcttgcagagagcttgaaccgagctatggacaacttgtggcatctcggagatgagttccgtgggcaatcaaaggtggtggaggaccgccaatggtctctcatgacatcaaagctggctgagatcacaaagtcaaaggctgagaggatgaatgactctgagtatgcacggatgaacaccgtccctgatgtgaagcaatgggataagttatcctaccaccaagaagacaacatgatggaccacctcaatcttggcctcatgaacctggatcttaagatgaatgatc

SEQ ID NO: 10615 - DNA, 386 bp, Triticum aestivum
  Clone ID: uC-tsrow189103d03b1
gttccccgaccagcgccgccaccatcctccggccgcgcgcgcagcgcgaggccgccacccgccacggcgcgccgcgcccgtcctaccatgcggtgacgcccgaagccgccacaccgagcccttctgaccgcctcgccgccgcacgcacatgcagttccccccgtcgcccgcgcgctccatggccgcgcccgcggccgtgcccgccgtgtcctgcctgcgcctcctcctcctccccgggttcagcgcctccctcctcgcggccccgcccgacccggcggccatgctgcgccggccggccgccgccacgacggccgcggaggagcgggaggccgacgcggacgcctcgctgggctctccggtggacgacgagccgcccgaggagggga

SEQ ID NO: 10616 - DNA, 315 bp, Triticum aestivum
  Clone ID: uC-tsrow189103d04b1
ttgatttgcaactcctaatagttgccggccactgcaagtagttaagcttagctccaaggagctagcagagaagaagcccagctcggtaaggagaggagaggcagaaatggaggtggaggccagcgctcatggtgacacggcggcgagcaagttcacgctgcccgtggactcggagcacaaggccaagtccttcaggctcttctccttcggcaacccacacatgcgcaccttccacctctcgtggatttccttcttcacctgcttcgtctccaccttcgctgcggctccgttggtgccaatcatccgtgacaacct

SEQ ID NO: 10617 - DNA, 349 bp, Triticum aestivum
  Clone ID: uC-tsrow189103d05b1
tcggcttactcctaccatctgtatgaagaggatgtcaaagcgctgaaggacatgggcatgaaagtgcataggctctccatctcttggtcgagaatactgccaaatgggacgggggaagcaaaccaggcaggcatcgactactacaataacctgatcaactcactgataagtcacgacatagcgccatatgttacaatttggcactgggacacccctcaagcactggaagacaagtacggcggcttcttagatctgcagattgtagatgattacaaacaattcgccaaggtgtgctttgagagcttcggcgacagggtgaagaactggtccacctttaacgagccacata

SEQ ID NO: 10618 - DNA, 405 bp, Triticum aestivum
  Clone ID: uC-tsrow189103d09b1
tgtcgttcgcaccaacaggctcgcagctgctagctcaatggcagggacgcgagcgttcttggtcgcgctcgtcgtggctctcacgtttctcttcatggagggcctggcggcagcggtgccggcgactccggagagtacagcgcagcggcggctggaggcgcgaagcctcctcaggcggctcaataagcctcctgtcgcaagcattcagagctcggatggtgatgtcatagactgtgtgcacatatccaaacagcctgcattcgatcatcctctcctcaagaaccatactattcagatgcggccttcttacaacccaagaggcatgcatcatgactccaacatcacagcccatgcaatcactcaaatatggcatcaaaatggcacgtgccctaagaacaccatacc

SEQ ID NO: 10619 - DNA, 151 bp, Triticum aestivum
  Clone ID: uC-tsrow189103d11b1
tcgcccacgcgtccgtttcactgcaaagaccaaaggatcttatggggttgacactggcaacctattctttgctgaagtcgcatatacgcgaggagatgatggattaacggtgaacagttgctgcatacttgaaccttgttctgatcatggc

SEQ ID NO: 10620 - DNA, 388 bp, Triticum aestivum
  Clone ID: uC-tsrow189103d12b1
tctcgtttgcccacgcgtccgcccacgcgtccggcgcaggcggatctcatcccatccaaggcaggcaggcaggtacgagatggctctcaccagaattggtcttgctggcctcgccgtcatggggcagaacctcgccctcaacattgcggagaaagggttccccatctctgtctacaacaggaccacctccaaggtcgatgagactgttcagcgcgccaagctagaaggaaaccttcctctctacggtttccatgaccctgcatccttcgtcaactccattcagaagccacgtgtcgtcatcatgcttgtcaaggccggtgccccggttgaccagaccattgcaacgctcgcagcacacctggagcagggcgactgcatcgctgatgga

SEQ ID NO: 10621 - DNA, 82 bp, Triticum aestivum
  Clone ID: uC-tsrow189103e01b1
tcggttagaggcacatgcccatcccctctgtcattggccaggcacgccggcatgggcacccgacgatggcctgtgcacccgg

SEQ ID NO: 10622 - DNA, 367 bp, Triticum aestivum
  Clone ID: uC-tsrow189103e02b1
ttgattggattcaaacggtgcataaatggaaacaccataatgatggctggatctgcaccaggatttccccacggtttaattgaccccatcgaggaacttggggagctggcttcacaatatggcatttgcttgcatgttgatctatgccttggaggctttgtattgcctttcgcccataagcttgggtatccaattcctccttttgatttttctgtcaaaggtgttacgtcgatctcaacagatgttcataagtatgggctagccccaaaaggcaccagtactgtcctatacaggaatcatgaaattagaaagcaccaatttgttgctgtgactgaatggactggtgggctctatatttcccctacta

SEQ ID NO: 10623 - DNA, 345 bp, Triticum aestivum
  Clone ID: uC-tsrow189103e03b1
tcggtttaagcagagacagaagagagatcgattccgactaaaacctctggccgtcgacgaccaagctcggagacctattgacctagttcctgatgtcggacgccgatgattaccgctgcttcgttgggagtctgccatggaacacaactgatgtggatctgaaggatgcgtttgggaaatttggccgagttactgagaccaaggtggctcttgacaagttctctggccggtcacgtggctttggatttgtgacttttgatgacaagaaggccatgaaagaagctgttgaggctatgaatggaattgatttggatggaaggaatattacttgtgaaagagcacaac

SEQ ID NO: 10624 - DNA, 164 bp, Triticum aestivum
  Clone ID: uC-tsrow189103e05b1
ttcgatttgcaacgcctcctccaatggggatggggccccggcctctgatgcaccgccacctccccgcgcgacgcccatacaccttgaccaggccggaggcggcgccgctgggtcgagccccgccacggcggccgacccccggaagggcaagggaatctccacca

SEQ ID NO: 10625 - DNA, 352 bp, Triticum aestivum
  Clone ID: uC-tsrow189103e09b1
tgtcgttcggctcccctcgctgctaagtatatgtcctgagctccgaatctcctaccgggttgggtctcgtaggcggtggatgagagcttgggacagtggaggagcatgacggtgatggagctgaaggcgctaccgttcggtttccggttccaccccaccgactaggagctcgacaggcactacctcaaggggaagatcacggggcagatcaagaacgaggtcgaggtgatcccggtgatcgacgtctgcaagtgcagagccgtgggacctcccagataaagctttgatccgctcggaggatccggagtggatcttctttgcacccaaggaccgcaagtaccccaatggaagc

SEQ ID NO: 10626 - DNA, 78 bp, Triticum aestivum
  Clone ID: uC-tsrow189103e10b1
ttgcgttcggctcgcgtccgtgagaaaggcatatatgatgaagctgaagcacaaccagaacgggcttaaaactcactt

SEQ ID NO: 10627 - DNA, 271 bp, Triticum aestivum
  Clone ID: uC-tsrow189103e11b1
ttgcgcgtcccagagcgggggcctctcggcgcaggtgatcaagagggccttcggcgccacggaggaggcgttcatgggcatggcggagaagtcgtggccgtcgcagccgcggctcctgtccgtcggctcctgctgcctggtgggcgccatcgaggacggcacgctccacgtcgccaacctcggcgactcgcgcgccgtgctcggccgcctcgccagcacgggcgggaagaagcggagggcggcggtggcggagcggctgtcacgggaccac

SEQ ID NO: 10628 - DNA, 346 bp, Triticum aestivum
  Clone ID: uC-tsrow189103e12b1
tcgcggacgcgtgggctgaaagttagggagatatggctgggattggtcctatcaggcaggactgggagccgatagtggcgcggaagaaggcgcataacgccgccgacaagaaggacgaaaaggccgtcaacgctgcccgccgctccggcgccgagatcgacaccaccaagaagtacaacgctggaacgaacaaggctgcatctagcggaacttccctcaacaccaagcggctcgacgacgacacggagaacctctcccatgagcgtgtctcaagtgacctgaagaaaaaccttatgcaagcaagactggataagaagatgacccacgcacaacttgctcagatgat

SEQ ID NO: 10629 - DNA, 357 bp, Triticum aestivum
  Clone ID: uC-tsrow189103f01b1
tcgactccgtcgaccagtcgagctactacccaagcgccatgggaggtggaaacaagcagtgcggcaacgacaccaacagcagaggccttgggggctactacccaagcgcctactcgtctccgcccatcgcgtaccctgcatacccccctccacaagccgggcatggatgccctcctgcctattaccctccacagccacagggatatgggcatggctatccatcagcaggagcatacgggtgtccaccctacagctatccccaccatcaaggtggctatcacggtcacggaggatctttgcttgttgccggtggcgcggccgctgcggcggcctatggcgcgcatcacttgagccatg

SEQ ID NO: 10630 - DNA, 294 bp, Triticum aestivum
  Clone ID: uC-tsrow189103f03b1
tcgagttcaccaaggtttagcaaatcgtgtgccgggccatgtcactacgccggagctcagcggctgcgctcgcggcgctgctggcgctggcggtgctgctgggcacgtcggcggacgatggcggccagggccaaccaatcgtggcgcgcgtgagcaaggacgcctccacctccctctacaccatcgccatcaaggtcggcggcgtgccgctcctcgtcgacctcgccggcccgatgctctggctcgccaactgccccaccccgcaccgcatcatcccctgcgtctcccacgact

SEQ ID NO: 10631 - DNA, 435 bp, Triticum aestivum
  Clone ID: uC-tsrow189103f04b1
ttgctttttttcatctcatggaaaactagaacgagtaggtccaacgtgaaacatcagccattacaccagtgtcgaatcagatttatccttacacattacatcagaacaacatcaggttatgtcttcttaggtgctccgccaatatatacattcagcaacgactaccacaggaacaaaaaaagaggcagttgcggacgcgtgggtgtgcataaaaatgttggcgatgatatgattaaatattgcactattgaagaaaccagttttctcaaaaccggctggaagaaacaccctcttaaacaaggatatttcttacctacactcgagaaggattcaatcgaaaatcaactgaattggatctcaaaggagggagatgcggttgaaaataccaaagtcaactgcaagaatgccttacgacaagcatttggtcatggacgc

SEQ ID NO: 10632 - DNA, 78 bp, Triticum aestivum
  Clone ID: uC-tsrow189103f05b1
tcgcttttgcagggcgccacgatagtggattggggtgtcatcgtaacaccagccactgactatgagctaccagctgat

SEQ ID NO: 10633 - DNA, 214 bp, Triticum aestivum
  Clone ID: uC-tsrow189103f09b1
tcgggagagggaaggcgccgcggacgatgactcgaccaacaatggagtccggcgcctgctcgccgctcctgctcgggctcgtgctgctctcgctcttgtcattgggcacagcgtcggcgcaggaaaagtgcggcatgaactacgggcagatcgccaacaacctgccggaccccacgcaggtggcgagcctgctccggtccatgaacgtgaaccg

SEQ ID NO: 10634 - DNA, 325 bp, Triticum aestivum
  Clone ID: uC-tsrow189103f10b1
tcggccatggcggcggcggcgcacaggctcctcgcggctagcacgaagatcgtcggggtcgggcggtactacgtggcccacgccaaggagctcggccaccccgtccccaaggagccggtgctgttcctcaagccgacctcgtcgttcctccacgcgggcgtggccaccaccgccgtcgaggtgcccgagccgctcgagtcgctgcaccacgaggtcgagctcgccgtcgccatctcacggagcgcgcgccacgtgcccgaggcctccgccatggacttcgtctgaggttatgctcttgctttggacatgacagcaagggaccttc

SEQ ID NO: 10635 - DNA, 375 bp, Triticum aestivum
  Clone ID: uC-tsrow189103f11b1
ttgctcgcgtcgcggcggcagttccactccctcgccatgggcaagattaagatcggaatcaacggtttcggaaggatcgggaggctcgtcgccagggtagccctccagagcgacgatgtcgagctcgtcgccgtcaacgaccccttcatcaccaccgagtacatgacctacatgttcaagtacgacaccgttcacggccactggaagcacagtgacatcaagctcaaggacgacaagactctgctctttggcgagaagccagttaccgtcttcggcgtcaggaaccctgaggagatcccgcggggtgagtctggtgccgattacgttgtggagtccaccggtgtcttcactgacaaggacaaggccgctgctcac

SEQ ID NO: 10636 - DNA, 297 bp, Triticum aestivum
  Clone ID: uC-tsrow189103f12b1
ttgttcatgcgcgacgggatcaagttccccgtcgtcatgcacgcgttcaagcccaaccccaagtgccacgtgcaggagtactggcgcgtcttcgacttcctctcccaccaccccgagagcctgcacaccttcttcttcctcttcgtcgacgtcggcatccccaccgactaccgtcatatggacggctccggcgtaaacacctacaccttcatctcccgtgccggcaaggcccactacgtctagttccactggcgccccacctgcggcgtcagctgcctcatggacgacgaggccacc

SEQ ID NO: 10637 - DNA, 73 bp, Triticum aestivum
  Clone ID: uC-tsrow189103g01b1
tcggcttcgacgccattgacggctcccagccagaggcggcgaggtacacatgctccctttgctccccgctgaa

SEQ ID NO: 10638 - DNA, 365 bp, Triticum aestivum
  Clone ID: uC-tsrow189103g02b1
catccgccgcccttttccaccccacgactgtggttcttccccttctttactcaccccgccgtcgactattcgccgccgtgggctcatatattagccgctgcgtgccgtctgccttcacattcacacacactcgcccggggacaagccaactcttgcgctcccacctccacagcagctcattagcagccgcgcacagagccagcgtgcatccatggcgcccctgctcctgctcttcctcctcggtggcctatgcgccctattctccctgggctactgctgctcgcgcggcgccaagaagtgctgcgacgtcgacggcgagaaggccaagagtcaccacggggagcaagaagccaaggccagcaagg

SEQ ID NO: 10639 - DNA, 312 bp, Triticum aestivum
  Clone ID: uC-tsrow189103g03b1
tcgcccatcgcgtccgcttgccttctacatcctgtgctttgcattcctccttccagttccaaccgcaatcaatggccgccatgaagatcactctccttgccgtggccacaatctcggcagtcttactgggcaccgcgtcggcggcgacctacggtgttggcgagccgggcggttcgtggaccctcaacaccgactacagcaactgggtgtccaacaagaagttccacccgggtgatgagatcatcttcaagtactcccccgcggcgcacgatgtggtcgaggtcagcaaggctggctacgactcctgcagca

SEQ ID NO: 10640 - DNA, 374 bp, Triticum aestivum
  Clone ID: uC-tsrow189103g04b1
ttgagtccgccgtgttcttcagagtcttcaaggatgggcatggcaagcctctcgtcctcatgtgcagtgaccccaccaagtcatctctcaccccgggtctatacaagccgacttttgccgggtttgtcgacaccgacatttcgtccgggaagatctctctgagaagcttgatcgaccgatcggtggctgagagctccggcgccggagggaagacctgcatcctatcgagagtgtacccatccatggcgatcggtaaagacgcacacctttatgtgttcaacaacggggtgaccgatatcaaggcgtccaaactaacggcgtgggagatgaaaaaaccaatgatgaatggtgcctaagtagtatataccgtatat

SEQ ID NO: 10641 - DNA, 413 bp, Triticum aestivum
  Clone ID: uC-tsrow189103g06b1
ttgccttcgcgtccggcgacccgcgtccaccaccgccgctttccccgtctccccctcaccgcgcggcgacgccgagcgacccagcggcgagcccggcatgcatcacgaccccaaccccttcgacgagggcaccgccggcgacgagaaccccttctcgaatggaggaggccgcggcgggaagcagcagcacggcttccggcccaccgagcccgtcggcttcggcggcggcggcagcaggggcgacgccaccgtcgacgtgccgctcggcaacatgggcgactcgaatggcaaggcgagggagctctcgtcgtgggaatcagatctgaggcgccgcgaggcggatatcagaaggagggaggaatcactgaagaatgctggagtgcccatggaggagaagaattggccgccttttt

SEQ ID NO: 10642 - DNA, 373 bp, Triticum aestivum
  Clone ID: uC-tsrow189103g07b1
ctggtgccccactggcttcaagtgtggtatcaactaccagccacctggtgtcgtcccaggcggtgaccttgccaaggtccagagggctgtgtgcatgatctccaactccaccagtgttgtcgaggtcttttcccgcatcgaccacaagtttgacctgatgtacgccaagcgtgccttcgtccactggtacgtgggtgagggcatggaggagggcagtgttctctgaggcccgtgaggatcttgctgccctggagaaggactacgaagaagttggtgctgagttcgacgagggtgaggacggtgacgagggcgatgagtactagagcctgcctcctggtgctttcccaaggcatgctgctgcaatcctatgatc

SEQ ID NO: 10643 - DNA, 424 bp, Triticum aestivum
  Clone ID: uC-tsrow189103g08b1
tcgctcggcttctccctcgccttctacgccgcctctcccaagccctcctctttcatcccccgtgccgcctcctcccgcatctccggtcgaacaccatcatcccgcggactcctcctcaccggcggcatcctccgccaccttaggaccctcgtcgccgttggcctcatgcttggcatgattgctggcttcctagggggcagcgtcttcttctcctacaagatcggcctcgagggcaaggatgccgtcatgtccctcaagtcccatgtcgaaaatggcaactactccgaaaagattggcctcaagaagttgcttgacgacaatgacatcccgggcttggtggagcagtactcagggaagctcgtcgaaaccgtttgggagcaggtagaccaattggctgtacaatacaaccttactgatttcacta

SEQ ID NO: 10644 - DNA, 111 bp, Triticum aestivum
  Clone ID: uC-tsrow189103g09b1
ccacgcgtccgcggtgttttagcgagctcagggaggccgtccggaggcgacgaccgccgtcggggaagaagaagaagacgccccaccactcgtatatgtcttcttgcccct

SEQ ID NO: 10645 - DNA, 338 bp, Triticum aestivum
  Clone ID: uC-tsrow189103g10b1
ggcgagggggagtgcattgacttctaccctgtcggccacagaagcaacgacaactcatcggagatgttgcacgtgttgaaggccagcatggacgactaacggcacgactactactcgctaggcacgtacgactcggcagcaaacgcgtggacgccgatcgacccggagctcgacttggggatcgggctgagatacgactggggtaagttttatgcgtccaccttgttctatgatccggcaaagaagcggcgcgtgctgatggggtacgtctgcgaggtcgactccaagcgggctgatgtcgtgaagggatgggccttgattcagtcagttccaaggac

SEQ ID NO: 10646 - DNA, 271 bp, Triticum aestivum
  Clone ID: uC-tsrow189103g11b1
tcgcgcgtcccagagcgggggcctctcggcgcaggtgatcaagagggccttcggcgccacggaggaggcgttcatgggcatggtggagaagtcacggccgtcgcagccgcggctcctgtccgtcggctcctgctgcctggtgggcgccatcgaggacggcacgctccacgtcgccaacctcggatactcgcgcgccgtgctcggccgcctcgccagcacgggcgggaagaagcggatggcggtggtggccgagcggctgtcacgggaccac

SEQ ID NO: 10647 - DNA, 359 bp, Triticum aestivum
  Clone ID: uC-tsrow189103g12b1
ttcgttctggcgagaacatggtgtattatgaaacaaagttatgttcttaagctcccatcatacaagttacaacaacacaagtttgagaagctgcctgcctcgcctgttcatggcatggcggcagcgagaaaaaacaacagtaacatcaacttaactaagtacaatgaaacgtagatataccaggaacctcccgcttcacagtcttgaacacttctatattcactttctgtgtacgtgttttcttttcctttggtgttaccttctctcgtcgactgctcagcagagcggcagcggcgcgtgctcgaccagcaccgcccgcagcttctgcatcagcgggtagttggggctgcaggggtcgt

SEQ ID NO: 10648 - DNA, 339 bp, Triticum aestivum
  Clone ID: uC-tsrow189103h01b1
tcgcggacgcgtgggcgcggtggcgcgggagctgcgagaccaatgccaccgacttcccctcctcgatgtgcaaccggaagctcatcggcgcgcgcggcttcttccggggcttcggggcgggcggcaggaacggctcctcccatgggaccaccgagctctcgtcgccgagggaccacgacgggcacggcacccacacggcgtccacggcggcgggggccgtggcggccgacgcgagcctcctcggttacgcccacggcacggctcggggcatggcgcccggggcgcgcgtcgcggagtacaaggtgtgctggaagcagggatgcttcaggtcggacatac

SEQ ID NO: 10649 - DNA, 245 bp, Triticum aestivum
  Clone ID: uC-tsrow189103h03b1
tcgagttcgccgcgttctgcagagtcttcaaggatgggcatggtaagcctttcgtccccatgtgcagtgaccgcaccaagtgatctctcaccccgggtctatacacgccgtcttttgccgggtttgtcgacacctacatttcgtccgggacgatctctctgagaagcttgatcgaccgaccggcggctgcgagctcaggcgccggggggaagacctgcatcctatcgagagtgtacccatccatg

SEQ ID NO: 10650 - DNA, 143 bp, Triticum aestivum
  Clone ID: uC-tsrow189103h04b1
ttcggttatcacacacgctctcctcgccgacaggatgttcgggttcgggcaccaccacaaggaccaggcaccggcggagtcgggccccaaccagatcttcaagatctactgccgggcctcggaggactactgcctcgccgtcc

SEQ ID NO: 10651 - DNA, 362 bp, Triticum aestivum
  Clone ID: uC-tsrow189103h05b1
ccgtgatccgtcactggcttgcatcttcttgatgaacaatggcaagtacattatccagaaagtgaatgacagcgagctaggtgttctactcggcgatgactggatcaagcagttgtcaactagagtgcgtcgctggagcatggattatcagcgttcaacatggggcaaggttacaactgtgctgcacattggtggctcaggcgttggtgcactcccaaccaaggcaatgctgcagaaattgcggatgtttaatacctactttgaggagatctacgcagtacaatcagaatgggtggtagccgatgatcagttgcgaatggacgtcagggcagcagtggaggattcagtgatgccagcatatg

SEQ ID NO: 10652 - DNA, 256 bp, Triticum aestivum
  Clone ID: uC-tsrow189103h06b1
tgaaaaagcagaggagaggaagcggaggcgacgatgtcggcgatgacggcggcggtgcccttctggcgcgcggcggggatgacctacatcggctactccaacgtctgcgcggcgctggtgcggagctgcctcaaggagcccttcaagaccgaggtctcctcccgcgagaaggtccacttctccctctccatgtgggccgacgagaagcagcataagcccactgtgcgcacagatgatgaatgaagatcgggtgcca

SEQ ID NO: 10653 - DNA, 138 bp, Triticum aestivum
  Clone ID: uC-tsrow189103h07b1
tcgctcggctcctgcctagccttgtacgccgtctctcccaagccctcctatcccatgcaccgtgccggctcctcccggatctccggtggaacaccatcatgcggaggactcctcctcacgcggcggcatcctccgcca

SEQ ID NO: 10654 - DNA, 391 bp, Triticum aestivum
  Clone ID: uC-tsrow189103h09b1
tcgcggacgcgtgggtccgccgcgatctcgtctcgctacgcactctctatctgagatttggaatcgggcgaggcctgcagctcctgccgacatggcgctcgttttgcattcgggcagtggcaacaagaatgccttcaaggcacttattgctgcagagtactgtggggtcaaggttgagctgaccaagaattttgagatgggtgtctcaaacaaaacccctgaattcatcaagatgaacccccttggcaaggttcctgttcttgagactcctgatggtgctgcttttgagagcaatgctattgcacgctatgttgcccgctcaaagggtgacagcctgctttggggtggttctcttattgaatatgcgcgtgttgagcaatggatggacttt

SEQ ID NO: 10655 - DNA, 360 bp, Triticum aestivum
  Clone ID: uC-tsrow189103h11b1
gagccctatcctgcccaaaccctcccctcccctgccctagcggatccacacctctccctagcggcggcggctgcggccacagcgggaagcgacaactcgaagcatccccccagcggcgagcatggccagcgtaggcacgcacgcggcgggagcgggcgagcagacaccgctcaagaaggcgggcgaggcggagcaagacgaggagctccaggccccctccggctggaccaagaagcttaattccactcggggtgggaagcctgaggacgcctcctgcgcaccaactggcgaggaggtcaagaccaagagagctttaaccacatacctaaaagcacaccctggaggccctgctctttcaga

SEQ ID NO: 10656 - DNA, 437 bp, Triticum aestivum
  Clone ID: uC-tsrow189103h12b1
tcgcggacgcgtgggcggggagtacgaccacgtgagggagctcatcaagtggggaaccgactacctgctgctcaccttcaactcctccgcctccaccatcaacaagctctacagtcaggtgggtaccgccaagatcaacggcagcacgccggacgaccacttctgctggaaccggccggaggacatggcgtacccgcggccggtccagcaggcgagcgcggccccggacctcggctgcgaggtggcggcggcgctggcctcagcctccatcgtgttccgcgacaacgccgcctactccaagaagctggtgaagggcgcggcgacggtgtacaagttcgcgcgcgccaacgggaagcgcacccgctactcccggggcaaccctgccatcgagtacttctacaactccaccagctactgggacgagttcatgtggagcg

SEQ ID NO: 10657 - DNA, 337 bp, Triticum aestivum
  Clone ID: uC-tsrow189108a08b1
accctaggtttcctactcttttgcccttatctcacccgaccgatattctttttctcctcatcgatatggaagtagtctatgctcagaggttcctccattagcttagtgtaaatattagacttgttggggtttagtttgctagaaggaattagtctctgcttggtgttcatttctgcttgctacaatggctgcgatgaacgaaaaggtgttggctaaatgtggacagaatatagttagcctcaagaggaagcgggacagccccgctgcatatcatgctgatgcctgccacacctctcaatcgcatcagcattctactggaaactctgatatcaggttg

SEQ ID NO: 10658 - DNA, 269 bp, Triticum aestivum
  Clone ID: uC-tsrow189108a10b1
gaagggaccaaagggccgtttcaagtaccagcctgggcaagtgagagcatttggaatgatagctggaggatcaggcattacaccaatgttccaagtcacaagggcaattcttgagaacccaaacgacaatacaaaaattcacttgatctacgctaatgtcacatatgacgacattcttctgctggaagaactggacaatatggctaaaaactatcctgatcgcttcaagatctactatgtcctgaatcagccacctgaagtctgggatg

SEQ ID NO: 10659 - DNA, 295 bp, Triticum aestivum
  Clone ID: uC-tsrow189108a11b1
caagctctacattcatttcacggtggagtttcccgactcgctggcaccggatcagtgcaaggctctcgaggctgtgcttccaccaaagcctgcatccaagctgaccgacatggagctcgatgaatgcgaggagacgacaatgcatgacgtcaacatggaggaggagatgcgtcggaaagcccatgctgctgctcaggaggcgtacgatgaggacgacgagatgcctggaggcggtgcccaaagagtgcagtgcgcacaacagtaagataggttgggcagcatgcttttttgggac

SEQ ID NO: 10660 - DNA, 209 bp, Triticum aestivum
  Clone ID: uC-tsrow189108b04b1
tgattggtactcttaccggtgctcagtggggaatctatgacgcgttcaaggtcatggttggactcccgaccaccggcggtgctccaccagttgctccggtagaggaagcagcgaaagccagcgcttgattgatttttcctactacgacgatgacgatgtattccgggatgatgtggtattggtggatggggactgtatcaattacttga

SEQ ID NO: 10661 - DNA, 311 bp, Triticum aestivum
  Clone ID: uC-tsrow189108b05b1
acatgcatgcctaaccctcttgcaaaagggaacagctttggctcaatggcttctctgtacagccagacaagatgggcttctcaagccactgctgtgaaagaaactgaccccagtggcggcaagataagcattgggcccaaatccaagcagatcaaggaggaggacaaagatgatggactggtttatcagggaccgatatcatcaaccatcaagaaagtgaagcttctgtccctgtccacctgctgcctctctgtgtcgctaggccctgtcataacgttcatgactacgcccgacatgaatgtgatcctcaa

SEQ ID NO: 10662 - DNA, 302 bp, Triticum aestivum
  Clone ID: uC-tsrow189108b06b1
acaccctgcttcagggatattctggcatccgcttcgagatcctcgagacgatcgccacgctcctcaacgccaacgtgacaccatgcctaccgcttaggggcactatcaccgcgtctggtgacctggtcccgctttcctatattgcgggactggtaaccggccgcccaaactccatcgccacggctccggatggcaccaaggttaacgcggtggaggcatttaagattgctggcatccagcatggcttcttcgagttgcagcccaaggaaggccttgccatggtgaacggcacagcagttggc

SEQ ID NO: 10663 - DNA, 324 bp, Triticum aestivum
  Clone ID: uC-tsrow189108b07b1
agacaagagtagacgatccccatccatcgccacctgaccaaccgaatcactcaccattcaccaagtgaaagcaaccatggcaccgccgcgttgcggttacatacgtggccccgcggccagccgacaccaacaacatccgtcgccgatcgatcgataggccccgcccaaccgatcctcacttcttcttactcttcttcttccgcgggcttctccctctccctcctaactctctcctcacacggatgcacctctacaggctacggcaacgaagctagcttgctacttgttggccttgcccagcagcttctcatcttctccccggct

SEQ ID NO: 10664 - DNA, 309 bp, Triticum aestivum
  Clone ID: uC-tsrow189108b08b1
cgggagaccgacttcgcgcgcttcccggactccgcccccatcgtcatcgacaacggcgcctccaccttccgcatcgggtgggctggcgaggcggagccgcgcgtctccttccgcaacatcgtgcagaggccgcgccaccgtagctcaggtgaaactgtgacagttgtaggagacactgatccagctctaatgaagtactttgactgcacacggacatcaattcgcttagccttcgatgatgatgtcgtctatcagttcgagtacatggaatatattcttgattatgcttttgaccgatttggtgccaca

SEQ ID NO: 10665 - DNA, 399 bp, Triticum aestivum
  Clone ID: uC-tsrow189108b10b1
cacgcgtccggtggttgggaggggctgagcacagcgcgggtcaatttgagaggttactaaaggaaatgtgtgctgatgatgacggtgaccttctaatagagtcttctgtgaaaggcattccgaaggtttttgctgtatcaactttagtcagcgccatgcctgcccaaccatatatattccggaactatcagtatccaccgggcactctggaggtatcaccaggaatggcagaaagtccatctcctggcgcagttggaacggttgtttctggtgcaccagttgggattaaacgtggagcttttatggggagctgcaagcatcacgtatgggaagccataagagcatcatctgcagctccatattatctggatgatttctctgatgatgtaaatcgctggc

SEQ ID NO: 10666 - DNA, 380 bp, Triticum aestivum
  unsure (1)..(380): unsure at all n locations
  Clone ID: uC-tsrow189108b11b1
cgtccccagccaacctcgggtggtcgnctcngtagtcgcagcggcggttccactccctcgccatgggcaagattaagatcggaatcaacggtttcggaaggatcgggaggctcgtcgccagggtcgccctccagagcgacgatgtcgagctcgtcgccgtcaacgacccctttatcaccaccgagtacatgacctacatgttcaagtacgacaccgttcacggccactggaagcacagtgacatcaagctcaaggacgacaagacgctgctctttggcgagaagccagttaccgtcttcggcgtcaggaaccctgaggagatcccgtggggtgaggctggtgccgattacgttgtggagtccaccggtgtcttcactgac

SEQ ID NO: 10667 - DNA, 304 bp, Triticum aestivum
  Clone ID: uC-tsrow189108b12b1
ggcgcgatgttcgggcgcgggccgccgaagaagagcgacagcacgcgctattacgagatcctgggcgtgcccaaggacgcctcccaggacgacctcaagaaggcctaccgcaaggccgtcatcaagaaccaccccgacaagggcggcgaccccgagaagttcaaggagctagctcaggcttatgaggtcctgagtgatcctgagaagagagaaatttatgaccagtatggtgaggatgccctcaaggagggaatgggaggtggaggaatgcatgatcctttcgacatcttccagtcattctttg

SEQ ID NO: 10668 - DNA, 99 bp, Triticum aestivum
  Clone ID: uC-tsrow189108c03b1
atcgagggcctttctgtacgcacctgacctgcatcagcagtcaggtgccatgccatgcttgtaaacaggcccctaaataaaatctccctggtttaactc

SEQ ID NO: 10669 - DNA, 314 bp, Triticum aestivum
  Clone ID: uC-tsrow189108c06b1
cccgccaatcccaccaagtccgccaaggccatgggccgggacctgcgtgttcatttcaagaacactagggaaacagcgtttgccctgaggaagatgtcgctcaacaaggccaagaggtaccttgaggatgtgttggcacacaagcaagccatccccttccggaggtactgccgtggtgttggacgcacagcccaggtgaagaaccgtcagcccaatggtcagggacgctggcctgccaagtctgctaagttcgttctggatcttctaaagaatgctgagagcaatgctgaggtgaaaggtcttgatgttgatgc

SEQ ID NO: 10670 - DNA, 271 bp, Triticum aestivum
  Clone ID: uC-tsrow189108c07b1
aggaaggccagcctcgtcgaaaggctcaacgccctcaacaactctgccggtgccgccgatgatgacgaggaggacgatgagtgaagagcgttcttgtccaccccagtgtagtattgcaacgtgcgtttttgttgaagtctggcaccctgcccaacgggcctgttcctttgagttttggttatgtcgcttgagttatagattgtgttatctggattatgtgccgtgctggcatttggatcttaatcttaatcctttagtctggcaccctttc

SEQ ID NO: 10671 - DNA, 310 bp, Triticum aestivum
  Clone ID: uC-tsrow189108c08b1
ccgcgcgacccgcaccgtagagcgtgtaacatactccaacacagcgacgaccgatggcccccgccgccgcctcgcagcaccaggcgaccaccgcggcgccgccgagcggccgtaaggtggtggacgaggtgtccggctggttgcgcgtgatggacgacggcagcatcgaccgcacgtggacgggcccgccggaggccctgccgctcatggagccggtgcagccctacgccgtgccccgcgacggccacacgctccacgacctccccggggagggggagccaagcctccgggtgtacctccccgaggtcga

SEQ ID NO: 10672 - DNA, 322 bp, Triticum aestivum
  Clone ID: uC-tsrow189108c10b1
ataactcccccgaaggagtgtcagtgagatcgtgggggcgttgatgagcgcgtcggcctcagccggctctttgtcggtcgccaagattcaggccaggaggcagataataacccgggtggtcctcaagagcctccaagcggacgacgtcgtcttcaagaaggtctcccgggcggtccactgcgccttccgtggcgtcctcctcggcggcagcggtgccaagggccagaagctagtggatgcagccctacgccgcatcggcgcggggaagctcgctgaccgtgtggtgaaggcggctgaagtgctcatcagggtggccacggtc

SEQ ID NO: 10673 - DNA, 130 bp, Triticum aestivum
  Clone ID: uC-tsrow189108d08b1
ggagacggtggccgtcgggtcggtgaatctcatgatctggaactgcaccatccccggaaagcaggggactgattgggaaagtggatactacccacttactttacacttcagtgaggactaccctagcaaa

SEQ ID NO: 10674 - DNA, 305 bp, Triticum aestivum
  Clone ID: uC-tsrow189108e01b1
aaggcccgcagatcttcgacagccgcggcaaccccaccgtcgaggttgatgtgtgctgctcagatggaaccttcgccagggccgctgttcccagcggtgcatcaactggtgtttatgaagctttggaactgagggatggtggatctgactacttgggaaagggtgtatccaaggctgttgacaatgtgaactcgattatcgcgccagctttgattggcaaggaccctacagctcaaactgagctcgacaactatatggttcagcagcttgatggaaccaaaaacgaatggggttggtgcaagcag

SEQ ID NO: 10675 - DNA, 288 bp, Triticum aestivum
  Clone ID: uC-tsrow189108e03b1
tctctcatcgttttataatgacactatcgtgaactgcccaacgtgctcttgcggctgccaaaacaatattactcgtccaggaagctgtgtaaatgacaattcgccttatttgcaatctgccatcaatggccctggcaaattaaccggccagcctcttgtccaatgtacttcccacatgtgcccgataaggatccattggcatgtgaagctcaactacaaggactactggagagtgaaagtcaccatcacaaacttcaactaccgcatgaattatacagactggaacat

SEQ ID NO: 10676 - DNA, 339 bp, Triticum aestivum
  Clone ID: uC-tsrow189108e04b1
tagagtagcactttgctctttcttcattccactggtgcgttgccgttcggaatggaagaacctaaatgttccaaggctgaccgctcgacaaactatgcaggcaattttccataagttgtttctctagttttaaatactgacagccagtctccctgcttcttgccccattttgtttggtgatgtgtatctaatgtgtacgacattcgtaaaatcagctcccccttttagcaagttggctgagaacggctgtagtgctgattgttcttgttctgagttggaaaagctcgaggcaccaaacaaaaatgcagtttactcttttcgctggcaaacaatgttgct

SEQ ID NO: 10677 - DNA, 305 bp, Triticum aestivum
  Clone ID: uC-tsrow189108e05b1
accatctccattaccgtcagggtctttattgtatccgtcgctacacgacgttctgccgtcaagcagctaccctccgccgggaacgacgggctcactgtttccgtcgtcaaatttcggaccaaacagtagctacccgccgccgtcggcaccggccactgcatatccgccaccgccgccgtcgtgcacagcctgcccggctcctccggcacaatacatcagcagctatccaccttcactgccgagctattatcctcctccaccaccgagcggctacccaccttcagcacggatgaacccggagttcc

SEQ ID NO: 10678 - DNA, 308 bp, Triticum aestivum
  Clone ID: uC-tsrow189108e08b1
actgctgcaacagtcaagccacttcctgagcgagtccctcgtagagccccctctgcaatggaagaagatgaagatgaagatgaggatgaggatgaggaggaagagtgggttgaagtggacccaagtgtgctggagtctacctcaaacatgcaagttgatgaggactctaaatcagatgatgagatggctgatcttgaaatgttggatccctcggtctgcttcatgtgtgatctcaagcatgacaacatagaggactgcatgatccatatgcacaagaagcatggtttcttcatacctgacagtgaata

SEQ ID NO: 10679 - DNA, 257 bp, Triticum aestivum
  unsure (1)..(257): unsure at all n locations
  Clone ID: uC-tsrow189108e09b1
acatcttctgcagtcaatannggttaccatgaaaatctgtcgggtgtttgtcaatcactcgcatatgattatctcgttgtagctactggccatgtttttgcttctgctggaagcagaacagagaggcttgcagaattccagagagataacgggaagataaaatcttccgagtctgtgttgataattggaggtggtccaactggtgttgaacttgctgcagagatcgcagtagactatccagagaagaaggtgacact

SEQ ID NO: 10680 - DNA, 320 bp, Triticum aestivum
  Clone ID: uC-tsrow189108e10b1
atgggacgcatgcacagcaacgggaagggcatgtcgtcctcggtgatcccctacaagcgggaggccccgacctgggtcaagacgtccgcgccggacgtggaggagatcatcgtccgcgccgtcaagaagggccagctgccgtcgcagatcggcgccctgctccgcgacggctacggcatcccgctgtccaaggccgtcaccggcgccaagatcgtgcgcctgctcaaggcgcgcgggctggcgccggagatgcccgaggacctctacttcctcatcaagaaggccgttgcgatccggaagcacctggagaggaacaggtc

SEQ ID NO: 10681 - DNA, 340 bp, Triticum aestivum
  Clone ID: uC-tsrow189108e11b1
aagcagtccgacgtgatgaggttcgtgcagcgcgtgcgttgctgggagtacaggcagcagcccgccatcgtccgcatcaccaggcccacccgccccgacagggcacgccgtctcggcttcaaggccaagcaggggtatgtggtctaccgtatccgtgtgagacgtggtggcaggaagcgcccagtgcccaagggtattgtttatggcaagcctaagcaccagggtattacccaactcaagttccagaggaacaagaggtctgttgctgaggaaagagctgggcgcaggcttggtggtcttcgtgtcctcaactcctactgggtgaatgaggactccacct

SEQ ID NO: 10682 - DNA, 190 bp, Triticum aestivum
  Clone ID: uC-tsrow189108f02b1
tgaggccgctgctcaatttgccttttcccagttgaagaagatcctccctaatgcaggtgagccgcttaactacctagtgtcacactggggcctagacgagaatacgcttggcttctacacctttgacggggtgggcaagccgtgcgacctttacgagaagctccgcatacctggcgacaacctatttttt

SEQ ID NO: 10683 - DNA, 313 bp, Triticum aestivum
  Clone ID: uC-tsrow189108f04b1
tacgggcgtggaatcaccgtggtcgagagagctatggcaaagaggaacggttcccccgtgatttctgattttgagattggcgtcgaagaattccactctgagggcaggtctgcgatcaaaggattcaatttcagagacgagcgtgttatggatggtaactgggttcaccaagcccactccggtgtcatcgagatgttcttccggttgctggccatatgccacacatgcataccggaggtcgacgaagttacagggaagatttcatacgaagcagagtctccagatgaggctgcctttgttgtcgcggcacatg

SEQ ID NO: 10684 - DNA, 241 bp, Triticum aestivum
  Clone ID: uC-tsrow189108f05b1
acgcccgcttcatcgccttcggcgtggcgttcgcagtgcagatatggtgcatcgaccgcgggggcccggtgttcgtggccgtgtaccagcccgtgcagacgctcgtcgtcgccatcatggcctccctcaccctcggcgagaagttctacctcggcgggatcatcggtgccgcgctcatcatcaccggcctctacctcgtgctctggggcaagagcgaggagaggtcgcgcatcggcaagga

SEQ ID NO: 10685 - DNA, 353 bp, Triticum aestivum
  Clone ID: uC-tsrow189108f07b1
ctttgaattaccctaccaagctccagataagctttccacatatataaagtcgatagtgaacacatcggccactggccagtgaggagtataattatgtgatgagagtaattccggatcatgacgaggtaatttcgctagatacctcctctcggaaggttcgcaaatgaataaaattattggctgctcttgttttcttttgttcttgacattgaagtcaaacctcctagttacctgtgttcaaaacttgatcgctatattgttgatgctgttcgctctcataaaatggaacccattccgtactggctatgaataggagttgttatttaagcttgtgctcaattgttagcctgcta

SEQ ID NO: 10686 - DNA, 320 bp, Triticum aestivum
  Clone ID: uC-tsrow189108f08b1
ccaagtgccaggccaacaatgccaatgctggcttcaacgcaggctatctctccggcttccccgagtcggagatcactgcggtcgaggaccgcacactgactagtggtaatgtcccgtggtactcgctgcacaagacaatggcaggtctgctggacgtctggcgccacatcggctctgaacaggccaagacggtgctcctcaacatggccaactgggcagacactcggacggccaagttgtcgtacgccaagatgcagaccatgatggacaccgagttcggcggaatgaacgatgtcctcaccgagatctactattacact

SEQ ID NO: 10687 - DNA, 296 bp, Triticum aestivum
  Clone ID: uC-tsrow189108f09b1
aaaagccaggaaggaaggaagcacaaagactctccacccacctactcgaaaccaaaatcccctctccgactctcagaaatccagcgcggcgattctgatctacatacagatccccttgagctccctcgctcgctcgctccggccggtcgtcgagatttggagtgcctgagacgttcatgggtgtggagtgagatcgagagcggggaccgtgaattcctacgagggccgccattcggcttgcgcgtctgcatgaactgtttcgtcaatctgggactcaactccaactccaaccacta

SEQ ID NO: 10688 - DNA, 276 bp, Triticum aestivum
  Clone ID: uC-tsrow189108f11b1
ccacgcgtccgcggacgcggtggggactttgaagacttgaaggggctctgctgcgctatagctgatggccttgttacctaagcctgcaccgtatgcaagcatcaacaatgtgtgcagcggttcattatgtaaaatcacccagaatgttactgcaactataaacatatcgtgtatcatgctctcccattccccgtgtttagcgtgttatgcctaaatactatgaaacatatgtctcaagacatccgggttgatgaataaagcttgctgttctcctca

SEQ ID NO: 10689 - DNA, 421 bp, Triticum aestivum
  Clone ID: uC-tsrow189108f12b1
tgcagcctactgcactggtgtgcttttggctcgtcgtgtgcgcgagaaccgtgatctcgatgaggagtatgaaggcaatgttgaggccacgggtgaggacttctctgttgagccttctgatgagaggaggcctttccgtgcgctcttggatgttggtcttattaggaccaccactggaaaccgtgtgtttggtgcccttaagggagctttggatggcggccttgacattccacacagtgacaagagatttgctggtttcaagaaggatgaaaagtcgctggatgctgagattcaccgcaagtacatctttggagggcatgtcgctgactacatgaggtcactagcagatgaggaaccagagaagttccaaactcacttcagtgagtacatcaagaggggaatctcagctgatgacatggaa

SEQ ID NO: 10690 - DNA, 134 bp, Triticum aestivum
  Clone ID: uC-tsrow189108g04b1
cttccaggccaacatgcggatcctggtcaccggcggagctggctttatcggctcgcacctcgtggacaagctcatggagaacgagaagaactaggtcattgttgctgacaactttttcactggggcaaaagaca

SEQ ID NO: 10691 - DNA, 291 bp, Triticum aestivum
  Clone ID: uC-tsrow189108g05b1
aggagggtgtcaccaaaggtgcccaccggtagctaccccatcgcccaggtgaattacgagctcaacgtgctgggcaccagggggccgaggcgtatgcagtgcacgatgcactccatcccagcctctgcagtcgacccggatggcgtggtgcctgggcaaccccagcagctgctccccggtccgttcgacgagtccttccgcagcacgaacgcctcctccaggttctccatggcagacttcagcagctctcgcttctcaagctcccgattctcagatgtaagtggtgggttg

SEQ ID NO: 10692 - DNA, 317 bp, Triticum aestivum
  Clone ID: uC-tsrow189108g06b1
ttcgtcgagaggcacgtgaatttgcaaatgaactttgtgcaagtacgaaagcaccaaaaaatccagctgtttggcttgaaggttctaataatgctggccagaatggcagtagtgctgatacttcaacagtatctgatgcatactcaaagatgcttacgatatttatcccgctgcttgtggatgagagttccttctttgcacattttatgtgcttcgaagtacctgcacttgttccagctggtgctccttacgttaacaagcgttgatctggagcaaatgaccctgatgatgacgacctgagccttatggatccggat

SEQ ID NO: 10693 - DNA, 339 bp, Triticum aestivum
  Clone ID: uC-tsrow189108g07b1
ggcgccggcgattttgagcagaaaatctgaagacgaaagaactgaagaaataccaagagcgtacaaaagaactgtgctgctgcatatcttatcctcccaaccatctagaaatcgaagccaccgccgtcgtcgaacccgccgtcgtaccctccggcggagtcggagatcatgtcgccgatgaggagcccgccgagcgcgcctccgaggagccccgcgccgaggcccatccccatgccgctcttcttcggcggcttcacggcctgctgctggtacccgtacccggccggctgctgcggcgggtagccgtagccgccgtaccctccttgcggaggcgggggc

SEQ ID NO: 10694 - DNA, 244 bp, Triticum aestivum
  Clone ID: uC-tsrow189108g09b1
agacgggttaacaaaggggaggcacacgcacaccccgctaccccagtaatatccagcactccattttaccgactaacaataacagcgcaccagcactatatccccatgtccaacgtgctggtacagattacatactgaatgacacagatttattgccaccacaagggggtatgggattgctctagctctcggcgctgactgcatcggctgtggcttccttctcttttaccttctccgagctcac

SEQ ID NO: 10695 - DNA, 291 bp, Triticum aestivum
  Clone ID: uC-tsrow189108g12b1
tcaaccccccgtcgatcccggggatctttcgccccgagaaaaggtggcaacccaaggaaaggagaaggcgacgacgcgacgacgacgtcggcatcgagtagaaagcagagcagagattttccttggggtgccacgggaggagccgatgccgatgccggcgccggcgcaagaagcggacgacgacttcaccttccccacgccgccgccgcttctcgccgcagccgcgtgcagctacggccaccaccgccacagcaacagggtgtcgccgtcgccgtcgccctcctcctcccc

SEQ ID NO: 10696 - DNA, 283 bp, Triticum aestivum
  Clone ID: uC-tsrow189108h05b1
catgtatgttggagaatcagagaagaatgtcagggacatctttgagaaggctagatcagcacgcccatgtgtgattttcttcgatgagcttgattcccttgctcctgcacgaggatcctctgcagattctggaggtgtgatggatagagtggtttctcagttgctggtggagattgatgggttaagtgataacagccaggacctcttcataattggggctaccaataggcccgaccttcttgattctgcacttctccgccctggccgatttgataagctgttg

SEQ ID NO: 10697 - DNA, 319 bp, Triticum aestivum
  Clone ID: uC-tsrow189108h07b1
ctgttttggaagaagctgcgcaggatactgaattggatacctgagcctttggattatatccatcatgcctctcttcgtcttggccgagacgcctgcgggctacggtctcttcaaggccaaggacaagaagcttctgtctcgcgatgatattacgaagtcgctcgatggcgccgatgccatcaattccgctctttcattgaagaagatgatcaagttcgaggactccgcccaggctctcggtgaatacagctctctgtgcgagggcaaggttaccccgatgctgcagcaattgctcgacgacatcaaggaggagcgcaag

SEQ ID NO: 10698 - DNA, 268 bp, Triticum aestivum
  Clone ID: uC-tsrow189108h09b1
cgctcgccgtcatgggacgcatgcacagcaacgggaagggcatgtcgtcctcggtgatgccctacaagcgggaggccccggcctgggtcaagacgtccgcgccggacgtggaggagatcatcgtgcgcgccgccaagaagggccagctgccgtcgcagatcggcgccctgctccgcgacggctacggcatcccgctctccaaggccgttaccggcgccaagatcgtgcgcctgctcaagacgcgcgggctggcgccggagatgcccga

SEQ ID NO: 10699 - DNA, 221 bp, Triticum aestivum
  Clone ID: uC-tsrow189108h10b1
accaaggcgcccaaggtgagcattcggttcgtcggcacggagctcggcgtcaagccggcgccggccgtggcgtacttctccgcccgcgggccgacccagatgagcccggcgatcctgaagccggacatcgtcgcgccaggggtggacatcctcgcggcatgggtgcccaacaaggaaatcatggagatcggcaagcagaagctctacgccaagtacatgct

SEQ ID NO: 10700 - DNA, 209 bp, Triticum aestivum
  Clone ID: uC-tsrow189108h11b1
ttcaccatcacaaagcaaaaaaacaaaggaatatttttcgtagaagtgtgaaggtgtactcaactcagcagcaggtgatggtctgacacgtacgtgcttgtgcctgtaggtgggtaccgccaagatcaacggcagcacgccggacgaccacttctgctggaaccggccggaggacatggcgtacccgcggccggtccagcaggcgagcg

SEQ ID NO: 10701 - DNA, 293 bp, Triticum aestivum
  Clone ID: uC-tsrow189108h12b1
tccctccgtctatcgactgggtgggttctgcagagaagagcggagcatagcggatcaacaaagcgcatgaagcggaagccatggggttcaggaagggcctgctggcgtgcttcggcccgggcggcggcggcgacgaggaggcggagcatgaggcgcgggcgacgccgggggcgcggcggcggcgcacggtgatgaacctgcggtcgctgtcgctggaggacctgtcgcggacgctggccacgacgaccctgcacgccttcaccctcgacgagctcaagtccgtcaccaagaac

SEQ ID NO: 10702 - DNA, 241 bp, Triticum aestivum
  Clone ID: uC-tsrow189114a01b1
ttccagatgcaggacactcggccaatgaagttggcgttgcggatgaactggtattagctaacgaaaagcttaaaggcatgctgaaaaaatgagcaggctgactccatagaggcacacagcctgtggcaaagaatttcagctcaattttactggggtcacgttgcaaaataagaactggtactaccattttagcatttagcacagcctgattgtacgtgtcaaacagttccctattcaatca

SEQ ID NO: 10703 - DNA, 187 bp, Triticum aestivum
  Clone ID: uC-tsrow189114a03b1
aacagatacgtaaaagtgtagcagaagcagatgatctactagtgttagctgtgccgccggtaattatgctatgatccgcttaatcgtactcattctttgcgagtgattactactacatatataagtataaaggaggaagtactagtatatgaagtgaactgttgataggaactgtagtttctagaag

SEQ ID NO: 10704 - DNA, 253 bp, Triticum aestivum
  Clone ID: uC-tsrow189114b02b1
aagggtatttggggtggcttgattgggggaacggccttgcagacagtcattatgctatgggtcaccataagaacagactgggccaaagaggtagaggaggcacagaaaaggttgaacaattgggacgagaagaaagagcctctccttgcagggttcaaggacaataacaaataagtggaccagtctagttttgtgtttccagttatccgagtcagaagtgtactggctatgagactcgccgtgggcgtgggtg

SEQ ID NO: 10705 - DNA, 178 bp, Triticum aestivum
  Clone ID: uC-tsrow189114b06b1
tggagaaactgatgaggatgctgcggttggtaaccatgaggcctgacagttgcttgcgacaaatgcatattcagctaccaaagctggggctgaaatgcttgtgatggcttatgggaggccttatggtcttcctgtgattacaacccgaggcaacaatgtgtatggaccaaatcagttc

SEQ ID NO: 10706 - DNA, 146 bp, Triticum aestivum
  Clone ID: uC-tsrow189114c01b1
gcagcgagcgagcgagcgacgcagtgcggtgccactctcgccggcccccgtggctggctgcgtctgcttagctgcagctttgcagtggtgtgtgtcacagtgtcagttccacctatgatcgatcggtatcctatccggtttgtgtt

SEQ ID NO: 10707 - DNA, 294 bp, Triticum aestivum
  Clone ID: uC-tsrow189114c04b1
aagcgcgcccccggcccgcgcaaggacgaggtggtgacccgcgagtacaccgtcaacctccacaagcgcctccatggatgcaccttcaagaagaaggcaccaaatgccatcaaggagatcaggaagtttgcacagaaggccatgggaaccaacgatgtccgcattgacgtgaagctcaacaagcacatctggagcagcggcatcaggagtgtccctaggagagtccgtgtcaggattgcccgcaagaggaacgaccaggaggatgctaaggaggagctgtactctctggtcaca

SEQ ID NO: 10708 - DNA, 150 bp, Triticum aestivum
  Clone ID: uC-tsrow189114d05b1
ggggccggcttcatgctctcccccaacctggacctcgagaagctccaggcgatggcgttggagctccaggccgtggcgtcggagtacctgcggtccttctgaacataccgtttatactgagaggggagaggggagaggggagagaaataa

SEQ ID NO: 10709 - DNA, 371 bp, Triticum aestivum
  Clone ID: uC-tsrow189114d08b1
gcagaagctggccaagaagcagcgccagaaccgccccatcccctactggatccgcatgaggaccgacaacaccatcaggtacaacgccaagcgcaggcactggcgccgcaccaagctcggattctaagccggggatgacgatgatgacgcccgttgccgccgacgggagaagggtctagggtacctagggtttatggcgtctcgttgtttttgcaagctagcatgtgactccgggatgcctgttttaagattaagatttcgcttgtgttgagagatattattatttactgcttgtagcctacctgggataccatcatattttgctgattatggaacagcttttatcctgcttaagctctgtattttgcccg

SEQ ID NO: 10710 - DNA, 319 bp, Triticum aestivum
  Clone ID: uC-tsrow189114d09b1
caaccagcaggctcctccaccgccaccagggtacccgacggcggcggcggagcaaggccaggccggcgggaagaagggccgccgggcgagcaccaaatccaggggcgagaagggcttcatagagggatgcctcgccgcactgtgctgctgctggatctgcgagatgtgctgcgactaaccggccggcgacggcgaggccgctgctgccacaagacctcggtgctatagcacccacgaggaggaggagcgtacgcgtatacggagagagaaattgttcctaatttcagtgcccgttgttttaggttctatacatatatac

SEQ ID NO: 10711 - DNA, 361 bp, Triticum aestivum
  Clone ID: uC-tsrow189114d10b1
aagatgctgtcgaggatctcccgccttggcgtccacgccctgaaccgggcgaggctaggtcaaaagtcagtaacttcaaggaatcaggaagaacccatcagagcctgtatgaactatgtgggtaatcattctctatgttccgccacggaagctaaagtcagtgacaggagcgaacagccgaaagctaagatatctgtgacatttgttgataaggatggcgatgaaacggttatcaatgttcctattgggatgtcaatgctggaagctgctcatgagaatgacatagaacttgaaggagcatgtgagggctctctagcatgttctacctgtcatgtgattgtaacggacgtagactactata

SEQ ID NO: 10712 - DNA, 218 bp, Triticum aestivum
  Clone ID: uC-tsrow189114e05b1
ccatgttgaccgacaagattatcagctgattgacataactgatgatggatatgtcagccttctaactgagagtggcaacacgaaggatgacctgaagcttcccactgatgatgttctgcttggccagatcaagactggatttgctgatggcaaggacctgatcctgtctgtgatgtccgccatgggtgaagaacagatctgcgctgtgaaggaaatcg

SEQ ID NO: 10713 - DNA, 253 bp, Triticum aestivum
  Clone ID: uC-tsrow189114f05b1
caccagaacacctacgcatggaagcccaacctcggacggaagatcaacgagaccgagcccggggacaggatgcggcctctgtcggagatcaccggcgtctgccagcgctgacgggaccaaatcgactggaagcgcaaatacggcaggtacaagccgattgatgagcctgcaaaatgccagaagtgcagaaaacgaaacgtacggcaggcataccacaacgtctgcacaggttgctccaaggagcttgggattt

SEQ ID NO: 10714 - DNA, 237 bp, Triticum aestivum
  Clone ID: uC-tsrow189114g01b1
gaagcgcgcccccggcccgcgcaaggacgaggtggtgacccgcgagtacactgtgaaccttcacaagcgcctccatggatgcaccttcaagaagaaggcaccaaatgccatcaaggagatcaggaagtttgcacagaaggccatgggaaccaacgatgtccgcattgacgtgaagctcaacaagcacatctggagcagcggcatcaggagtgtcccgaggagagtccgtgtcaggat

SEQ ID NO: 10715 - DNA, 127 bp, Triticum aestivum
  Clone ID: uC-tsrow189114g03b1
cgctggtggcggaggagcacgagaagaggctcaagcgaggggcgccccgcgtctccgccgacgaggaggcgttcatgggcaaggtgaacttcctggcggtgaccaaggtgtggggctcctgggccga

SEQ ID NO: 10716 - DNA, 384 bp, Triticum aestivum
  Clone ID: uC-tsrow189114g06b1
gataagtttgcgaagatatgggacatgcagacaaaaacatgtgtccaaacatttggagaattcaagtcttcggttatttctgttgtttcccatcccagtcttccagttttaattataggcacaagagatggtgctattcatttgtggggcacaaatttcaggtacaagcgacaacttagcattggcggtcctggaggtgctaatggtctcacatgtctgacggcgttaggaagggttgtgatgggaaatgagtcggcgctattcatgatggagatccttgatgaagaaccagatgctcctgtcggaagtgaagaagcagttggtagctcgggcagcaattgaaattcccagtgtgggagacggtcgattatgaaatctgaattg

SEQ ID NO: 10717 - DNA, 198 bp, Triticum aestivum
  Clone ID: uC-tsrow189114g09b1
ctatatagtcttgacagataatgtgggtgttttggaaagataaagctctctgtcaaagagctagctatcagattgttttcgtgggtgttaaattgtccgtggcgctgtttgtttgcccatcatggttttactatgtccgctttgtactctgtactcgccactccgacagacttgatacattgtagtattgacttgtct

SEQ ID NO: 10718 - DNA, 310 bp, Triticum aestivum
  Clone ID: uC-tsrow189114g10b1
aactccatcaagaagacccaccgcgtgctgatcgtggaggagtgcatgcggacaggcggcatcggcgctagcctgaggtcggccatcatcgacaacttctgggacgagctggatgctcgccccgtgtgcctgtcgtcgcaggacgtgccgaccccgtacgccgagaccctggaggacgcgaccgttgtgcagcccgcgcagatcgtggccgcggtggaggagatctgccaatagtaacgctgtcatgagttacatgtttcgaggattcagaagcagcgtgcgtgtccagtttgctttgtcgtgtaattag

SEQ ID NO: 10719 - DNA, 296 bp, Triticum aestivum
  Clone ID: uC-tsrow189114h08b1
tggcggcggtgcggatctgtttgtgcacttccgcaacatccaagcctccggcttcaaatccctcaaggagggccagcaggtcacgttcgtcgccgtccaaggccagaaaggcatgcaagccaatgaagtcatcactgaggagtaattaagtaatcttccggcgcccgcttctatctcgtttattctggatctcacactctgtaacacgtactacgtccggtctgcttgttggccaataattgtgtggggctgaacaaccatgtatgcacttttgtcatgttgactttcaactttgg

SEQ ID NO: 10720 - DNA, 173 bp, Triticum aestivum
  Clone ID: uC-tsrow189114h09b1
gaagatcaaagtggagtataccaaatggagtgcaacccaatgattgatctttttcttttctatatgtggctgtctttttcttcttcagtgccgagaacaacatcagctgttacacagtacttacctaattatgttgttatatgcctcttatgaaagacttctatccataaacc

SEQ ID NO: 10721 - DNA, 242 bp, Triticum aestivum
  Clone ID: uC-tsrow189115a01b1
cagataaggcagctgggaccaggaatgattcagcaaatgcagcagccttgcaacgagtgcaggggaagtggggagaccatcagcgataaggatcgctgtgggcagtgcaaaggtgagaaggtggtgcacgagaagaaagtcctggaggtggtggttgagaagggaatgcagcatggacagaagatcaccttccccggcgaggcggatgaagcgcctgataccgttactggagacataatctt

SEQ ID NO: 10722 - DNA, 312 bp, Triticum aestivum
  Clone ID: uC-tsrow189115a02b1
ttctcccttcccgcacttacgtttcagtccctgtcgcttcttttttccttacaggctactccccgttccgttgcaaaaagcccctgagctctgtcacattctagcctcgactccttggtcttgggaggagttcgtcgcagatccgatctagagagcctccccgcaccacccatgtttaccttccccttcctctgacggccgccgtcccccgatgaagctgcgcgtccgctgccgctcccactccttctacgtcgccttcctctactggttctacgacttctcatgaactactcgcccctcgacaacgccgca

SEQ ID NO: 10723 - DNA, 223 bp, Triticum aestivum
  Clone ID: uC-tsrow189115a03b1
gaggagaaaggtggaatcaagaccgatgcttttttcgaaacaagtgtccatggagtgtatgccgttggcgacgtggcgaccttcccgatgaagatctacaacgactagaggagagtggagcatgtcgaccattccaggaagtccgcggagcaggccgtgaatgcgatcaaggggaaagaggcgggctctgccgtggaggagtacgactacctgccctacttct

SEQ ID NO: 10724 - DNA, 234 bp, Triticum aestivum
  Clone ID: uC-tsrow189115a05b1
atacaacagagtcctgtccacccactccctccttgagcacactgatgtgtctatccttcttgacaatgaggccatctatgacatctgccgccgctcccttgacattgagcgcccaacatacaccaacctcaacaggcttgtttctcaggtcatttcatcgctgacagcttccctgaggtttgatggtgctctgaatgttgatgtcaatgaattccagaccaacttggtgcccta

SEQ ID NO: 10725 - DNA, 180 bp, Triticum aestivum
  Clone ID: uC-tsrow189115a06b1
ggcaagaaggtcatcctcttcggcgtccctggcgccttcacccccacctgcagtaatcagcatgtaccaggcttcattactcaggccgaggagctcatagccaatggtgtagacgagatcctgcttgtcagcgttaatgacccctttgtcatgaaagcatgggcgaagacatacccagat

SEQ ID NO: 10726 - DNA, 192 bp, Triticum aestivum
  Clone ID: uC-tsrow189115a07b1
gaagcgcgcggcggcggcaggcctacgactacgaggccgacccgcgctgggccgactactggtccaacgttctcgtgccgacgcacctcgccgtccgccccgacgtcatcgcccacttccgtcgcacgttctaccagcgctccatcgatcgtgatttggtggacgagcctatgtcaaccactggttccactc

SEQ ID NO: 10727 - DNA, 236 bp, Triticum aestivum
  Clone ID: uC-tsrow189115a08b1
aaaagcgggcctcacgagattcggagcgtgaagcgcatcttcctgctggagacgctggagaatgagctgccggagggcaccatcaggtactcctccaagatcgtcgacatcgaggaagagggcaacgtcaagctcctgcacatggccgacggttgcaccatcagagccaacgttcttgtggggtgcgacggagtgaactcggtggtggcgaggtggctgggcctgcccaagccgat

SEQ ID NO: 10728 - DNA, 64 bp, Triticum aestivum
  Clone ID: uC-tsrow189115a09b1
cagggatcgcggcgccggcggacggcggagcggagacgcgtgcctggtgggcggaggggaggat

SEQ ID NO: 10729 - DNA, 300 bp, Triticum aestivum
  Clone ID: uC-tsrow189115a10b1
agccaggctaacttcatcagtatcaagggacctgagctgctgaccatgtggtttggtgagagtgaggctaatgtgcgtgagatctttgacaaggctagagggtcagcaccatgtgtcctcttctttgatgagcttgactctattgccacccagagaggaagcagcgtctgcgatgctggaggtgcagctgatagagtgctgaaccaactgctgactgagatggatggcatgaacgccaagaaaactgacttcatcattggtgctaccaacaggccagacatcatcgaccctgccctgctt

SEQ ID NO: 10730 - DNA, 202 bp, Triticum aestivum
  Clone ID: uC-tsrow189115a11b1
ttccggaggtgggagagtggaggggcccgggttctgtgccttaggtgtgtttatagtagcttaggtcttcccggtggcagcggtggggtggtgccggcgtcgcgtctgtggaataaaggttcagctgctcgtcttacacctcggcaccgtattctggggtgatgtcgtcgagcggccgctctagggtgctcgtcgatctatg

SEQ ID NO: 10731 - DNA, 160 bp, Triticum aestivum
  Clone ID: uC-tsrow189115a12b1
acatactgctgtaggcactgttcacagtggcgacattggctgtcactgcacccatattcctttcataccgactgcatgggatcttccaagtactaacggtgtgtgctgcaacatggaacggtggaagcttcatcctggaggtgatgcccagacaaggtgt

SEQ ID NO: 10732 - DNA, 195 bp, Triticum aestivum
  Clone ID: uC-tsrow189115b01b1
ccatggcggaggaggagggcacgcagcaactgccgttcgtgcgggagacggtcctcaagaagaggaaggacaacgaggagtgggccaccaagaaccgggagcgcaaggcggccaagaggaagcgccgacggcacgacgccgagggcgccatcaagcgtgccgaggacttcgagagggagttccgcaacaaggagc

SEQ ID NO: 10733 - DNA, 216 bp, Triticum aestivum
  Clone ID: uC-tsrow189115b02b1
accaagctttagtgctaatttggtaataatcctgggttctgaccacgtcagtagcgtccactagtcgacgacggcggctcaaggaaatcgaggaaggaggcgagtccgtgccacggagtcactgtcggggagcactaagggagctccctgtcttggctagcaacaagtatgttcagcacgccgcctccagccacaagcatcgccgggaggaggaca

SEQ ID NO: 10734 - DNA, 272 bp, Triticum aestivum
  unsure (1)..(272): unsure at all n locations
  Clone ID: uC-tsrow189115b03b1
ctcgcgcccaagccgncggcggaggacactacggcagaggcacaagaccatgacgagaactacgacatcgaggaacagccgacggacggcgacggcgaagagaagccctctggcggcgggtccgagtacgtgtcgcagctgttcgccgcgctgtggggcttggcgtcgaagctcgggaaaggcccgctgcactacgtgatgaggccgatcgctttcgctgtcaaggcgccgaggaagatgctcaccgtcgtgccgggcatgtctggcatgaa

SEQ ID NO: 10735 - DNA, 120 bp, Triticum aestivum
  Clone ID: uC-tsrow189115b04b1
agcaccagacgcgatcatccgatacacctttgggacgccaccaccggcgagcttcgatgcacttacagagcatacgacgccatggatgagataacggctgcactttcaatatcgtttaat

SEQ ID NO: 10736 - DNA, 309 bp, Triticum aestivum
  Clone ID: uC-tsrow189115b05b1
ccaccggacacttttctctctcaccaatggcggccgtgaacaagtccgtcgaccggctggtgcaacgcctggtggcgccgtccgagtccacgccggtcggtccgctccgcctgtcctggcttgatcggtaccccacccagatggcgctcatcgagtcgctccacgtcttcaagccggctcttgaccggcattttgacggcggcgacgacgctggcccggcgaggaccatcgagcgggctatggcgcaggccctggtgcagtactacccgctcgcgggacgcctggggttcacggaggaaggtgggctgc

SEQ ID NO: 10737 - DNA, 368 bp, Triticum aestivum
  Clone ID: uC-tsrow189115b06b1
gcgccgccggctgtctccctcctccaactccgcccacaccctcgccgccggctgcctccgccgactccgccacgcccctagccgctcgaccccgacccctccacgtccctcgccgtcgtgccccgacttcgccccgccctcaccgacagacgccgtttcaatcatggcacgccgaggattgatggagcaggacctaaccaagcttgatgtcaccaagctccacccgttgtcacccgaagtcatctcgcgccaagcgaccatcaacattggtacaattggtcacgtggcccatggaaagtctactgttgtgaaagctatatctggagttcagactgttcgcttcagaatgagcttgaacgtaacatcac

SEQ ID NO: 10738 - DNA, 367 bp, Triticum aestivum
  Clone ID: uC-tsrow189115b07b1
tggacattccttggctgaagaattactataatttcggttttgatcactttgaaatgtcttggaggaaagttggtttttctggtttagttgatcttctgctagggaatactgggccgttttcctcaggagactggattctccctgacctcacaattcaaggatctctaaaaattaactctaccctcaagacctttcccaatacattctacttcagttacgctacaaagagaactcgaaagctatttggaattacagtaccatcaagcgtccttggagttcatccaatgctctttctcagagttctccagatgtgtatgtggcggcacccttaaaacgcacctctaccttacaaaggatacagggatga

SEQ ID NO: 10739 - DNA, 251 bp, Triticum aestivum
  Clone ID: uC-tsrow189115b08b1
gctgtcgctatcagcgcaccgcagccgccgccgtcgccgtcaacgccaccaccgccatcgccatcggcttcctcttcttctccggcaagctgctctcaccggagattcatcgatggacggtgatttggtggaggctgctacttgttagattggtgcagacaaagagcttttgcttcaaatttatgtagtttgtctgaacatatgatgccatccctatgaagaacttatgtatagttagttatgatgctagc

SEQ ID NO: 10740 - DNA, 256 bp, Triticum aestivum
  Clone ID: uC-tsrow189115b09b1
ccatcgccatttcgtgaactcgaaacggattgatgattagacggagagaatagtgtgacagcatgctcccaataccaagggaatttaggttcagagttccaggaatggttgagctgaccctagtagtgcttgctgctagatttggcgtcgaggtggtaataaagccttcagagagcatatccacaagatcacaatgttgctgatcttaagatggaataagctcagatggcgcattgtatcaagttcgccagggcac

SEQ ID NO: 10741 - DNA, 233 bp, Triticum aestivum
  Clone ID: uC-tsrow189115b10b1
ggcagttccactgcctcgccatgggcaagattaagagcggaatcaacggtttcggaaggatcgggaggctcgtcgccagggtcgccctccagagcgacgatgtcgagctcgtcgccgtcaacgacccctttatcaccaccgagtacatgacctacatgttcaagtacgacaccgttcacggccactggaagcacagtgacatcaagctcaaggacgacaagacgctgctcttt

SEQ ID NO: 10742 - DNA, 268 bp, Triticum aestivum
  Clone ID: uC-tsrow189115b11b1
ggtcatcatcggcatgaccggttctttccggcggccaggaacctgcaaggatggcggacgtggttggcatccccacggagatcctccgcctcgcgctggcgatcaggcaggcggctgacacggtgaggcagaacagggaggactgcctcgagatccagcggtgcgtgaacaggctccacggcatcatgtcctcggctattcgcggcacaggcacggacatgatagcgaacttggcagtgagcgccgcgctgggggacctggaacggat

SEQ ID NO: 10743 - DNA, 301 bp, Triticum aestivum
  unsure (1)..(301): unsure at all n locations
  Clone ID: uC-tsrow189115c01b1
cgccgccacctnctacccttcgcatcttcccttgccgccgctggaggcagacgccggcaagcccacgcggtcgtcgatgagggcggcggcgaggtcttcggccacgattctttctcgggaacgggcctagggttccaggcggcgacctggtggtgtgggcggcgccgtcccggcggcgttggctggagctatggccgcctcccctcggctgcatgggtggcgagtcggtggtggacctgtgtgtcgggcggcaggacccctgtgacctgcttcgccagatctaaagatggcgcccgttcgc

SEQ ID NO: 10744 - DNA, 277 bp, Triticum aestivum
  unsure (1)..(277): unsure at all n locations
  Clone ID: uC-tsrow189115c02b1
cgacctcgncaacctcgacctcagcgactgcaccgacaagatcatcgtcgagtacctctggattggaggatccggtatcgacatcaggagcaaagcaaggacggtgaacggccccatcacggacgcgagccagctgcccaagtggaactacgacggctccagcaccggccaggctcccggagaggacagcgaagtcatcctctacccccaggccattttcaaggacccgttcaggaggggcgacaacctccttgttatgtgtgactgctacacacca

SEQ ID NO: 10745 - DNA, 173 bp, Triticum aestivum
  Clone ID: uC-tsrow189115c03b1
gccggaggcggaggcgatggtggacgtgtggctggaggtggaggcccaccatgtacaaccccgcggtcagcgccatcgtggtgcagtgcatcatcttgccgctcctgggcggtgcgcgggaccagtcggtggtggacgagaacgtggacaagcttaagaaggtgctggaggtg

SEQ ID NO: 10746 - DNA, 362 bp, Triticum aestivum
  Clone ID: uC-tsrow189115c04b1
tagtgcacctcccaaattacatatgagtgaggaactgaggattgtgtgagccatggcttcatgttaaacagtatgatggtcaagtgccaaaccctcactccaaagggggctatacacatcttttaacacaaactagataaacatattggaataactaatggtttcaatttgaaaaaaaacgagtaatcgacagtccgaatttgaacagactgacatcagcatggagtgcacaatttttgaggaacgagaaattacttacacgaacaatctcctcgtaagtctcatcatcaatttcaatggaagtcactatctcttctacatctccaagtatcatattgagatgttgatcatacgcatggagc

SEQ ID NO: 10747 - DNA, 259 bp, Triticum aestivum
  Clone ID: uC-tsrow189115c05b1
acatcctccatgggaagtttctttccaggtcgacgggttatcattgtatcagataccataccaactcctactggcacttgttgattttgaagagaaatttgaacagatacttttgatgaactcccaagtgttataatatcaccatcagcaagttcgggaggcgcactccaacgactagaaccaacatcacgatgggtaactgcctgggaattcaagaaggttccattcaaactgcccatatacacaagttcccatctga

SEQ ID NO: 10748 - DNA, 346 bp, Triticum aestivum
  Clone ID: uC-tsrow189115c06b1
cccgagtgcgctcgccgcattccgatcccgccggccaattggttcggcgccggcgcgggggcgatggtgtcgggcgggtgcgtggggacggaagggggcgcggagccggaggagtccgcggcggtagcggccgaggaggtggtggcggcgacggcgcccgcgcgcgccagggagctggtggtcgggtacgcgctcacgtccaagaaggccaagagcttcctccagcccaagctccgggggctcgccaggaagaaaggcattcaatttgttgcaattgatcaaaagcttccactgtcagatcaaggcccttttgatgttattctgcataagttgactggaaaggagt

SEQ ID NO: 10749 - DNA, 245 bp, Triticum aestivum
  Clone ID: uC-tsrow189115c08b1
ggagaggaagcagaagctcaacaggtacaggaagaagaagatccagaggaactttggcagaaagatcaagtatgcttgcaggaaggctctggcagacagccagccgagggtgcgagggaggttcgccaagatggacgacggcgacatgctcaagccgaggaagtagacggggccatggaggccgccgccaagccgatgaggatggaagacaaaggttgttgcaaggagggaattaagctgctgct

SEQ ID NO: 10750 - DNA, 299 bp, Triticum aestivum
  unsure (1)..(299): unsure at all n locations
  Clone ID: uC-tsrow189115c09b1
gcatctgatgacttccatttctcgttttggttaggagttcccacgatgggatggttacaaacttaaagtccaagtgactataaaagaaacaacaaaaacatagtaaaatgtataaaattacgcagctttccccccaccactggtggggggttttggagctgaccccttaggaaaacaattcttcgattgtttgctagatacgttatgagacggacctgtttaaggggccgttccatttctgaagctaacaaactntaagtcgttgatttgcctgcgatttgaagacgtcgtagctgcat

SEQ ID NO: 10751 - DNA, 355 bp, Triticum aestivum
  Clone ID: uC-tsrow189115c12b1
ccctctgccctgatctgctctcggcgcgcgttctaagctcagatcatgccgacggccatccgcaagcgcccggcggcgggacaagaaccgcgcgtccatggcggcaagaggccccgatacgcgttcgggagcatcaccgactacgagaagcttgaggtgctcggagaaggcacctatggcgaggtgttcaaggcgcgcgaccgccgcaccggcaagaaggtcgccgtgaagtgggtccgtggcaacggggccggcggacacgggccgcccgacatccgcgcgatcacccgcgaggccggctgcctcggcgcgtgtcggtgtcacgagtctattatcgagatcttggatgtggcga

SEQ ID NO: 10752 - DNA, 295 bp, Triticum aestivum
  Clone ID: uC-tsrow189115d01b1
tcccccggcagcccaaacatggactctagcaggcgcccgagtggaatccagcaattgcttgctgcagagcaagaggctcagcaaattgtaaatgctgctagggctgctaaaacggcaaggcttaggcaagccaaagaagaggctgagagagaaatagctgagtaccgtgcacaaatggaggctgatttccagaggaagctcactgagaccagcggtgactctggcgcaaacgtcaaacgccttgagcaagagacaaacgtaaagattgagcagctcaagcagcaggcagcaaaca

SEQ ID NO: 10753 - DNA, 145 bp, Triticum aestivum
  Clone ID: uC-tsrow189115d02b1
gcctactgcggcaagtacaaggatgagctcatcaagaacgctgcctacattggcacccctggcaagggtatcacttgctgctgatgagtccggcaccatctgcaagcgcttcgccagcatcaatgttgagaacgttgaggacaac

SEQ ID NO: 10754 - DNA, 208 bp, Triticum aestivum
  Clone ID: uC-tsrow189115d03b1
ggagggcagggaggcgggatggacgccgcgctcctcgacgacatcatccgccgtctgctcgaggtgcggacggcgcgccccggcaagcaggtgcaggtctccgagtcggagatccgccagctatgcaccgccttctgcgacatcttccttacccaggccaacctgctcgagctcgaggcgcccatcaagatctgcggtgatatccatg

SEQ ID NO: 10755 - DNA, 234 bp, Triticum aestivum
  unsure (1)..(234): unsure at all n locations
  Clone ID: uC-tsrow189115d04b1
caagagccgntagtgtcctagcccaattcagatccttagctgcagctggttttagttgcttcccctctggtgctgaggtagaagaagaaggaggaggtagcagcatcgccatgagcccgccgagtgtgatggggcagttcggggacacgacctacaccaaggtgttcgtgggcgggctggcgtgggagacccagaaggagaccatgaggaagtacttcgagcagttcggggaga

SEQ ID NO: 10756 - DNA, 367 bp, Triticum aestivum
  Clone ID: uC-tsrow189115d05b1
tcccgatctcgctggcgctgctggaccggctgcggctggggcggctgccgccgggcccgcgcccgtggccggtggtgggcaacctgcggcagatcaagccggtgcggtgccgctgcttccaggagtgggcggcgcggtacgggcccatcatctccgtctggttcggctcctcgctcaccgtcgtcgtctccacctccgagctggccaaggaggtgctcaaggagcacgaccagcagctcgccgaccggccccgcaaccgctccacccagcgcttcagccgcaacggccaggacctcatctgggccgactacggcccgcactacatcaaggtgcgcaagctctgcaacctcgagctcttcacccagaa

SEQ ID NO: 10757 - DNA, 51 bp, Triticum aestivum
  Clone ID: uC-tsrow189115d06b1
ttttagtggcgcgtgaacctgctgtgccaaagacgacgaccaaacgaactt

SEQ ID NO: 10758 - DNA, 351 bp, Triticum aestivum
  Clone ID: uC-tsrow189115d07b1
ggaggagaatgtgagcacattgacgattctggtgatggggaagggcggtgtggggaagtcatccactgtcaactccattgtcggggagagggtcgcgaacgtcagtgcgttccagtctgagggtctgaggccaatgatgtgctcccgcaccagggcaggattcaccttgaacattatcgacactcctgggctcattgaaggtgggtatatcaatgagcaggctgtcgaaatcataaagaggtttcttctggagaagactattgatgtcctcctgtacgtcgatcgcttggatacatatagaatggatacattggatgaacaagttataagagccattactaattcattagg

SEQ ID NO: 10759 - DNA, 291 bp, Triticum aestivum
  Clone ID: uC-tsrow189115d08b1
cccccccccccttccgatcgattcgattcggttcggcccccgaccgatcgccgccgccatgtgggccgcgtcgtgcctggcgtcctgctgcgccgcgtgcgcctgcgaggcgtgccgcaccgccgtcggcagcatcggccgccgctccgcgcggatcgcctactgcggcctcttcgcgctctccctactcgcctactgggtgctccgcgaggtcgccgcgccgctcctccagtccatcccatggatcaaccacttccacaagacgccggaccgcgagtggttcgagacgga

SEQ ID NO: 10760 - DNA, 294 bp, Triticum aestivum
  Clone ID: uC-tsrow189115d09b1
ccgtaccacgcccccgcccccagcacccccgcctatcacgcccctcgtgcccatcgcctatcccgtttcctctcaccgcagcatcgcgtttccgcggtctccgccccttccgcaaccttcggtcattggtttgtgagagccttcaagatttgagcaccacaggcaacagtcttctacatcctagtgtcggtacttggtagggtaatcttccctggtccccagaagctgacctgtatatgagaagattgaacagagcatgtgaaccatcctgaaatctgatgcacatgtgaacca

SEQ ID NO: 10761 - DNA, 273 bp, Triticum aestivum
  Clone ID: uC-tsrow189115d10b1
gacaagggaggagggtgatgcagaatgggtaattagccgggtcatcgacctgcaaaatttgctcccacctgctgctctcgtggatgcagaggctgaagtgatggtattgggatttgccgagggagtgaatgtcattttcgttaacacggtggctggcctcttcacaatcgagctacagtcggagcgggtgaagaaggtgtgtgataatcatggctttctgtaatttgattccagttgtcagcttctgcactcctgtggaccgtctcaaatacc

SEQ ID NO: 10762 - DNA, 322 bp, Triticum aestivum
  Clone ID: uC-tsrow189115d11b1
gcagagcttcctcccgccctcggcccacgcggcgaggtcgtcgtcccggcaccggcccagccgcgcccgccccttccagtgcgcggccgtctccgcgccgtcgtcgtcggccgcctcgccgtcggcctcggccgtcccggcggagcggctggagcctcgcgtggagcagcgggagggcggctactgggtgctcaaggagaagtaccgcaccagcctgaacccgcaggagaaggtgaagctgggcaaggagcccatggcgctcttcacggagggcggcatcaaggagctcgccaagctgcccatggagcagatcgacgccgac

SEQ ID NO: 10763 - DNA, 254 bp, Triticum aestivum
  Clone ID: uC-tsrow189115d12b1
cccatacgtggtcagggtgcagctcgcgctccacctcaagggcgtgagctacgagtacgtcgaggaggacctcgccagcaagagcgagctcttcctccgctccaacccggtgcacaagacagtcccgatcctcatccacaacggcaagcccgtctgcgagtcccaggtcatcctccagtacatcgacgaggccttcgccggcgtcggaccgcccctcctccccgctgacccctacgagcgcgccgtcgcgcgat

SEQ ID NO: 10764 - DNA, 285 bp, Triticum aestivum
  Clone ID: uC-tsrow189115e02b1
aacttcgacaaggaggcggacgtgcactgcttccccggcgggcagctcgggctgtaccgcgaccgcgacctcatcatcggaccgcacccgacccgcaacccgcgcaacctcaccatggtcgactacaaccggttcctccgccgcgccttcggcctgccgcgggacgcccccgcggtgctcggcgacaagacggccgtcaggcccaagatgctcatgatcgagcgcaagggcacgcgcaagctgctcaacctgcgcgccgtccaggccctctgcgaggagctgggg

SEQ ID NO: 10765 - DNA, 320 bp, Triticum aestivum
  Clone ID: uC-tsrow189115e03b1
taaagaaatggcagccgagacgttcctcttcacgtccgagtctgtgaacgagggccatcccgacaagctctgtgaccaagtctccgacgccgtcttggatgcctgcttggcccaggatgccgacagcaaggtcgcctgcgagaccgtcaccaagaccaacatggtcatggtcttgggcgagatcaccaccaaggccaccgtcgactatgagaagatcgtgcgtgacacctgccgcaacatcggtttcatctctgatgacgttggtctcgacgccgaccgttgcaaggtgctcgtcaacatcgagcagcagtcccctgaca

SEQ ID NO: 10766 - DNA, 285 bp, Triticum aestivum
  Clone ID: uC-tsrow189115e04b1
acgcacagagctcaagctgttggcacggtggcggcaccggcgcttgcgtcggagcagcttcggcttcggcggctgccacagctgctgcgccctcggctagcccctgaagagcgagagcccgccgctgcactggttgcactccctctgcatggtccacgcgccgagttttcgacctcgaccacgcccaaccgtccggtggcagccatggaccgcgacctccccgatcatgccccaccatctcacattccctcctcgcctctagagctccgccgatgcttccgtctc

SEQ ID NO: 10767 - DNA, 226 bp, Triticum aestivum
  Clone ID: uC-tsrow189115e05b1
atgctttcctcctatgccccagggatctcagctgacaaggcttaccatgagcagctgtccgttgctgagatcaccaacagcgcctttgagccttcgtccatgatggccaagtgcgacccccgtcacggcaagtacatggcctgttgtatcatgtaccgtggtgatgttgtgccaaaggacgtgaacgctgctgtggccaccatcaagaccaagcgcactattcagt

SEQ ID NO: 10768 - DNA, 290 bp, Triticum aestivum
  Clone ID: uC-tsrow189115e06b1
ccactttattaaccacatgtcgatgctggaagccttcttcggcaagggcggcgccgccgccggcggcggcttccgcgccgccaagtgcaagacgctgctcaagctgtccatcccgcggataaagctgctgcggaaccgccgggagctgcagctgcgccagatgcgccgggacatcgccaagctcctcgaggccggccaggaagccaccgccagaatcagggtggagcacatcatccgggaggagaacatgatggcggcgcaggagatcctggagctcttctgcgagctcg

SEQ ID NO: 10769 - DNA, 258 bp, Triticum aestivum
  Clone ID: uC-tsrow189115e09b1
ctgctcctatttcgtccatgatgaccgtgaagcgatggtcacgtggccctgcaaccacacaaatcgggaagccagctgtgcatatggctagcgttgacttgagaggaaaagcatatgagatgttgaggcagaattcatccagctgcttgttggaagacatctacagaaaccctggaccactccaattcgaagggccaggtgctgatgccaagcctatttcactgtgcgtcgaggatcaagactacatgggcaggatca

SEQ ID NO: 10770 - DNA, 250 bp, Triticum aestivum
  Clone ID: uC-tsrow189115e10b1
ggtgaagctcgcattcgggagctgcggtgactccttcagcgccacgtccgtcagggcgtatgtggcggagttcatcgccaccctcctcttcgtgtttgccggcgttgggtccgccattgcctatgggaaactcaccgatgatggcgcgctcgacccggctggccttgtggcgatcgcgatcgcccacgccttcgccctcttcgtcggtgtcgcgatcgctgccaacatctccggcggccacctcaacccc

SEQ ID NO: 10771 - DNA, 175 bp, Triticum aestivum
  Clone ID: uC-tsrow189115e11b1
tcagcggcaaggcgatgcaggtctgggtggactacgagagcgactccacgcagatcagcgtgttcctggcgcctctgaagaatggagccaagccttcgacgcccctggtgtcagccaagagcaacctgtcgaaggtgctcgtggagccggcgtacgccggcttctcgtcgacgac

SEQ ID NO: 10772 - DNA, 219 bp, Triticum aestivum
  Clone ID: uC-tsrow189115e12b1
ggctgcatcgaccgcatcaagcggcgcgtcaacaagatcaaaggagtgaaggaagtgacggtggacgctgccaaggacctggtgaaggtgactggcaccatggacgcagccgccctgccgggctacctcagggacaagctcagtcggacggtggaggtggtcacccccggcaagaaggacggcgacaagaaagacgacggggagaagaagaaggacaag

SEQ ID NO: 10773 - DNA, 256 bp, Triticum aestivum
  Clone ID: uC-tsrow189115f01b1
ccgacgacgcgcgcaagtgcagccgcgcccgcttcatggactgcaccgagaagctcggcaccttcaccgacgacaacgtcgagttccagcgccgcatcgtggagcgctccgggctgggcgaggagacgtacctccccgaggccgtgctcaacctcccgcctaacccctccatggccaacgcgcgcaaagaggccgagctggtcatgttcggcgcgctggaccagctgttcgccaagacgggcgtcaagcccaagga

SEQ ID NO: 10774 - DNA, 299 bp, Triticum aestivum
  Clone ID: uC-tsrow189115f02b1
atcagatcaatccggtttacgtcggatgggcagttcctgtcgatggcggaaccagcggactttgtccatatctttgacgtgaagagcgactacaacagaaggcaagagctggacttcttcggcgagatatctgggatgtctttcagccccgacacagacgccctcttcgtcggcgtgtgggatagaacatatggtagcctcctccagtttgggcgtctgtataacaattggtaccatgacacgctgctttgaggctaaagcggagcggatgtcgggcctgcatgtctgtccccccacag

SEQ ID NO: 10775 - DNA, 287 bp, Triticum aestivum
  Clone ID: uC-tsrow189115f03b1
cagctcttgtgcgccatggtcgtgcgcaagccggcgcacctcttcctcgacgagctcaacatcgagtacgacgagcaggaggactacgtcgtcatcaagcacgccgcgctcttcacctccacggtcatgagccgcctcctcgcgcgccccaacgtgaagctcttcaacgccgtcgccgtggaggacctcatcgtcaaggagaaccgcgttgccggcgtcgtcaccaactgggcgctcgtctccatgaaccacgacacacagtcctgcatggaccccaacgtcatgga

SEQ ID NO: 10776 - DNA, 251 bp, Triticum aestivum
  Clone ID: uC-tsrow189115f04b1
aaggtgaggatcatcgaggcaccacccaggatctccatggaggctgtgaatggagccatggggagcgacgagttgccggagaggatttccacttcagaagatacagaattagagattgagcaagccaaggagatgggagaggaagcccaggagagggatgaggtggcaaaattggagattgaggaagctgaggggatggaggagaagatgcagactgggatgttctttaatatctactgtcgcgccttgga

SEQ ID NO: 10777 - DNA, 291 bp, Triticum aestivum
  Clone ID: uC-tsrow189115f05b1
agccgcgtcttcttcgccaacgatggcgacgtggagctgcaggcgtggtggaaggaggcgcgcgaggttgggcacggcgacctcaaggacgcgccatggtggccgaggatgcaagccgtgggcgagctggccaaggcgtgcaccaccatcatctggatcggatcggcgctgcacgcggcggtcaacttcgggcagtacccatacgcggggttcctcccgaaccggccgacggtgagccggcgccgcatgccggagcccgggacggacgagtacgcggagttagagcgcgac

SEQ ID NO: 10778 - DNA, 261 bp, Triticum aestivum
  Clone ID: uC-tsrow189115f06b1
tttttctttccgccgcggcaactgtgagccggcccgatcgagcgagccgccccccacgcacctcaagaaaccgccataattccatccatccatccgctgccgcgtcctacgcggccatttggggcgctcgtggggtgttcgtcacatcaaccaggccaagatcagatcggcggcgacgacggcgaccatgttcagcgggacgcagcagaagtgcaaggtgtgcaccaagacggtgtaccccatggaccagctctccaccga

SEQ ID NO: 10779 - DNA, 300 bp, Triticum aestivum
  Clone ID: uC-tsrow189115f07b1
cgcacacacactctctgcatgttccatgtgttttgtcacgacagctgggcatgatcatcaacgagacgctccggctgtacccgccggcggtggcgacgatccggcgcgccaaggcggacgtgcggctgtcggacgggtgcatgatcccgcgcgacatggagctgctcatcccgatcatggccatccaccacgacgcgcggcactggggccaggacgcggcgcagttcaacccggcgcggttcgccggcggggcggcgagggcggcgaagcacccgctggccttcatacccttcgggctcg

SEQ ID NO: 10780 - DNA, 256 bp, Triticum aestivum
  Clone ID: uC-tsrow189115f08b1
gctcagttcttgtgctctgcctcgtaaccggaggcgcgaggtgcaacaagttaagcagcaatttctatgactggacgtgccccggagtgtacaacatcgtccagcagcacgtgttttctgccatgagggaagagctgagaatgggggcctcccttctcaggcttcatttccatgactgctttgtcaatggctgcgatggttcaatcttgctggatggcgctgatggcgagaaatttgcactacccaacatgaactc

SEQ ID NO: 10781 - DNA, 196 bp, Triticum aestivum
  Clone ID: uC-tsrow189115f09b1
gaatctaccgggagatcctgccgaacccagagcacctggtctccaaggcgctttacaccttcgacatcggccagaacgacctcaccgtgggctacttcgacaacatgaccaccgagcaagtcgcggcctacgtccccgatctaatggagaggatctcgtccgcgatccaggccgtgtacgaccttggtgggagata

SEQ ID NO: 10782 - DNA, 113 bp, Triticum aestivum
  Clone ID: uC-tsrow189115f10b1
tctttgggagattttgtctcgtcctttagtttgtaattcttttctgccttgctattagtacatactctagattgtctttaaatgttaattcacagacttaacgacagcgtata

SEQ ID NO: 10783 - DNA, 341 bp, Triticum aestivum
  Clone ID: uC-tsrow189115f11b1
cagatggcatcctcctcttacttccttctcctcgccgctcttgttgcgttggtctcatggcaggccactgcctccgatcctagccccctccaggacttttgtgtcgccgacatgaattcaccagttcgtgtcaatggctttgtttgcaagaacccgatggaagttaatgcagatgacttcttcaaggcagccaacctcgacaagcctagggtgaccaacaaggttggatccaacgtcactttgatcaacgtcatgcagattgctggactcaacaccctcggcatctcaattgcgcgcatcgactatgcttccttgggtcagaacccaccacatacgcaccc

SEQ ID NO: 10784 - DNA, 85 bp, Triticum aestivum
  Clone ID: uC-tsrow189115f12b1
cacgctcctctgcctctacatcaccctggccaccgggatcaggtacacgcaccaatgcgactccaccgtcaacaccaccgacgcg

SEQ ID NO: 10785 - DNA, 275 bp, Triticum aestivum
  Clone ID: uC-tsrow189115g01b1
tggagagggagacggagacgctgcgggagctgctgcgccagcaggggcccgactgcaagctcatcttcgcgggccactcgctcggctccggcatcgccgcgctcatgacggtgctggtggtcaacaaccgcaaggcgttcggcaatatacccaggagccacatacggtgctacgcgctcgcgcccgcccggtgcatgtcgctcaatcttgccgtcaagtacgccgacgtgatctactctatcgtgctgcaggatgattttttgccaagaacacca

SEQ ID NO: 10786 - DNA, 231 bp, Triticum aestivum
  Clone ID: uC-tsrow189115g02b1
ggcgtcgccgtcgccgtcgccgcgcgccagatctcctccacgcgctcgcggtgcgccctcgccgcctgcgcgatctacccggccaagatggcgacctatgagcccaagaacatcctcataactggtgctgcgggtttcattgcatctcatgtggcgaaccgtctaattaggagctatcctcactacaagattgtcgtcctcgacaagattgactactgctccaacctgaaa

SEQ ID NO: 10787 - DNA, 289 bp, Triticum aestivum
  Clone ID: uC-tsrow189115g04b1
gacaggtggtcctgggagcgcgcggacggcgaaggacgcgcacctcccctaagactgctccacttccctggccccgtcgtcccgtctaagtcgccggcggcgtggacgcagcgatgttgcggacggtgctgcgccggggaggggcggccatgaggcaggccgtgctggccgagggatctacggggaaccttctacggctgagcgtggcggagcgggagcgctctcggcggcgtcggcgcgacccggggcgcgacgagttcttcgtgccaacgccggagtcgcttaaatg

SEQ ID NO: 10788 - DNA, 286 bp, Triticum aestivum
  Clone ID: uC-tsrow189115g05b1
gagaacgagaagaacgaggtcattgttgctgacaactttttcactgggtcaaaagacaacctgaagaagtggatcggacacccaagatttgaactcatccgtcacgatgtcaccgaaccactgctcgcggaggttgaccaaatctaccaccttgcttgccctgcctcaccaatcttctacaagcacaaccctgtcaagaccatcaagacgaatgtcattggaaccttgaacatgcttggacttgcaaagagagttggagctagaatattgttgacttcgacctctg

SEQ ID NO: 10789 - DNA, 304 bp, Triticum aestivum
  Clone ID: uC-tsrow189115g07b1
caccactagcctgcctgcctgcctgccgccaaggcaagatggtgaagatctgctgccttggggctggctatgtgggtggcccaacaatggcggtcattgccctcaagtgtcctgacattcaggtggttgtggtagatatcaccaagtcccggattgatgcctggaacagtgacacactgccaatctatgagcctggccttgatgaagtcgtgaagcagtgccgtggaaagaacctcttcttcagcaatgacattgagaagcatgttagtgaagctgacatcatctttgtgtcggtaaacacccc

SEQ ID NO: 10790 - DNA, 174 bp, Triticum aestivum
  Clone ID: uC-tsrow189115g08b1
tcaactacacctccggcaccacgtcggcgcccaagggcgtcgtgcactgccaccgcggcatcttcgtggtcaccatggactcgctcgtctcctggtccgtgccggagcagtcgacgtacctgtggacgctacccatgttccacgccaacgggtggagctttccgtgggggatgg

SEQ ID NO: 10791 - DNA, 295 bp, Triticum aestivum
  Clone ID: uC-tsrow189115g09b1
agcacggcgacctagcccgagctcgcaaccatggctaggggtttgaagaagcatctgaagaggctcaatgccccgtctcattggatgcttgacaagcttggtggagcttttgcccccaagccatcatctggtcctcacaaggccagggagtgcctgcctctgatcctcatcctgaggaacagactgaaatatgctctcacctaccgtgaagtgcaatctatccttatgcagcgccatatcatggttgatggaaaggtccgcactgacaagacctaccctgctgggttcatggaca

SEQ ID NO: 10792 - DNA, 344 bp, Triticum aestivum
  Clone ID: uC-tsrow189115g10b1
aggatcctatttctgcttcattgctgattgttaagggtggctttacaaccctagacatattggctgttgagtggctccaatccgggctaatacatttcggcacaactgtttcatactatggttttgttagtgatgtcctggaactttccgagaaataccagaagagatttggccctcttcgatattttgtggctggagtactcaaatttttgtgtctaccaagttacttctatgagttagaatatcttactttgtccaaggacatgttcgggcatggaaaaggtacaggacaagacaaagttgaattgtctgatgtctatacagatgtaatgcgcagtcgatca

SEQ ID NO: 10793 - DNA, 219 bp, Triticum aestivum
  Clone ID: uC-tsrow189115g11b1
tggccgtggcggcgctccggtgcgcgccggccgccgcggagctcccgctggtggagcacccggccaagaacgacgggtcgctcagcctgctcgtcgtcggggactggggccgcaacggcacctacaaccaatccagggtcgcggagcagatggggaaggtcggggagaggctggacatcgacttcgtggtctccaccggcgacaacttttacgagaatg

SEQ ID NO: 10794 - DNA, 199 bp, Triticum aestivum
  Clone ID: uC-tsrow189115h01b1
gggatggatactatatccatggtcagtgtgcgataatcatgtttgatgtcacttcaaggttgacatacaagaatgttcctacgtggcacagggacttgtgcagggtgtgtgagaacatccccattgtcctgtgccgggaacaaggttgatgtgaagaacaggcaggttaaggccaagcaggtgacattccacaggaaga

SEQ ID NO: 10795 - DNA, 119 bp, Triticum aestivum
  Clone ID: uC-tsrow189115h02b1
tgagggggatatgacaaaacaacacgccatggaggtggtgttgaatcaacaggtgaaggagcgtcacgagatggaaaaaaaactggcgaagcttgcaaagacaatggatcacttggaga

SEQ ID NO: 10796 - DNA, 228 bp, Triticum aestivum
  unsure (1)..(228): unsure at all n locations
  Clone ID: uC-tsrow189115h03b1
agcatntgaagaggctcaatgccccgtctcactggatgcttgacaagcttggtggagcttttgcccccaagccatcatctggtcctcacaaggccagggagtgcctgcctctgatcctcatcctgaggaacagactgaaatatgctctcacctaccgtgaagtgcaatctatccttatgcagcgacatatcatggttgatggaaaggttcgcactgacaagacctacc

SEQ ID NO: 10797 - DNA, 286 bp, Triticum aestivum
  Clone ID: uC-tsrow189115h04b1
catgaatcccgaatatgactacctcttcaagctgctgctcattggggactcgggcgtggggaagtcttgcctgctgctgaggtttgcggatgattcatatctggagagctatatcagtactattggtgttgacttcaaaatccgcaccgttgagcaagatgggaagacgataaagctgcaaatttgggatactgctggacaagagcgatttaggaccatcacaagcagctactaccgcggtgcccatggcatcattgttgtgtatgatgtgactgaccaggagagc

SEQ ID NO: 10798 - DNA, 187 bp, Triticum aestivum
  Clone ID: uC-tsrow189115h06b1
gccatggcgtccgggaagcacttcaagtacatcgtcctcggcggcggcgtctccggggggtacgcggcgcgggagttcgccaaacagggggtgcagccgggggagctcgccatcatctccaaggaggcagtggctccttacgagcgccctgccctcagcaaggcatacctgttccctcagagtcctg

SEQ ID NO: 10799 - DNA, 331 bp, Triticum aestivum
  Clone ID: uC-tsrow189115h07b1
ctcaagaaccagactgtcgatcttgtgttcacagcgcaccccacgcaatccgtcaggaggtccctgctccagaagcacgggaggatccgaaattgcctgaggcagttgtatgcaaaggatatcactgccgatgacaagcaggagctcgatgaggctctgcagagggagattcaagctgccttccgaaccgatgaaatccgcaggacacctcccactccccaggatgaaatgcgtgccggaatgagttatttccatgaaactatatggaagggtgtaccaaaattcttgcgccgtattgacactgctttgaaaaatattgggattaatgagc

SEQ ID NO: 10800 - DNA, 224 bp, Triticum aestivum
  Clone ID: uC-tsrow189115h08b1
tcctccctctcggcagttcgacctttgcatggcagcagtggctagctccaaggggcgggtgatcgctgggagcctcgtggcgcgcgtcctcgccggcaaggccaacgcctccccgaggagggcggtgcacgcgtcggcctacgacaagaacgtggacgagcaggtgcgcccggccttcgtgccggacgatgtgatcggcggcgccgggagcccagacaagtact

SEQ ID NO: 10801 - DNA, 282 bp, Triticum aestivum
  Clone ID: uC-tsrow189115h09b1
aagccatagttcattttccttctttccatgtgatgtcagcagtggtgccatttcgaaaatttatatgcgatggttcactaatgactggttgaactgagaccatttttgaacacccctattagcactacttgtttcgtccagactcataaactatacacatattataggcatgcaacacttgattacttgaacgcctaaaatgaagtggaaatatttagcgataagtgcaaaccatggaaaaccacaccaattgttttgtgttcctcactaaacattgtaaaa

SEQ ID NO: 10802 - DNA, 263 bp, Triticum aestivum
  Clone ID: uC-tsrow189115h11b1
aagctctacgcctggaaagttcgtgaggtgcaaagaacggtttgtgatcagcgatgactggacaatcacgccggcatccacttcgctgattcacaggttcagctctgaatctgaggccgccttccccgggtttgaggaggtggaagtgcgtgtcagctggcccaaggttatatccatgctgaaggcttctctgtcgtcggataccatattcactgatattttcttacccatgggaaccggtggtcaggatgctcgtgccactg

SEQ ID NO: 10803 - DNA, 182 bp, Triticum aestivum
  Clone ID: uC-tsrow189115h12b1
cgagacgttcgagtgctcgcacgacctgttccgctccgccttcctgcgcggtttagcgtgggaggtggtcaaggactactccggcccaccggtgatcgccttcaagttccggcactggggccacatggaggggccctacaagggcaacgcccccaccggggacaaggtcgagttctacggcg

SEQ ID NO: 10804 - DNA, 240 bp, Triticum aestivum
  Clone ID: uC-tsrow189118a01b1
cacgtggagccatgatctttttccgaagggggtgaaagaaataaacaaacaagggaaggaggttaagtatgattttgaggacaaaatcaatgcagctgtcttcccaggtctgcaaggtggaccccataaccatactattactggccttgccgttgcgcttaagcaggcaactactcaggagtacagagcttatcaagagcaagttatgagtaactctgctagatttgctgagagcttaac

SEQ ID NO: 10805 - DNA, 215 bp, Triticum aestivum
  Clone ID: uC-tsrow189118a02b1
ctgcggctgcaagttcgccgaccccgacacggtcgttccctccgcggcggcggcgtcgcatcgcgtgcggccggacaccatgagctgcggcagcgacgggtgcagggacggcggcagcggcggcggcagcgaggggttcgggcggtcgcggccgagcaaggtcgcggccgacgactcggtggagcccgcgcggtgctcggacgccacctcgccgt

SEQ ID NO: 10806 - DNA, 302 bp, Triticum aestivum
  Clone ID: uC-tsrow189118a03b1
agcactcacggctgatcttgtttctgttttacaggaatatcagcacctcatggccgcatatgagtatgaaaggaaactgaaggtggaccactccgagtcgctgcagggaatgaagaaaaattatgactccatggttacagagttagagaagcttcgtgctgagttgacaaacacaactaatattgacagaagtggtactttgtacaatcctaattttgctcagaaggatggcggtacatctagccaccattctgcttatgatggtggctatggggttgcacaggctaggacgccccctggta

SEQ ID NO: 10807 - DNA, 304 bp, Triticum aestivum
  Clone ID: uC-tsrow189118a04b1
agagaatcaaatgaagcagtttttatttttacaggaacagatcgcttatatccaggaccacattgcacgatttggtcatggatctgcgaagcttgctcgtcaggctcagagcagagagaagactcttgcaaagatggagcgtggtggtcttgctgagaaggttgtcaatgacaggattcttgtattccgctttacagatgttggcaaactcccaccaccagtgctgcagtttgctgatgtcacatttggttacactccggataatctcatctacaagaaccttgacttcggtgttgaccttgac

SEQ ID NO: 10808 - DNA, 298 bp, Triticum aestivum
  Clone ID: uC-tsrow189118a05b1
catctgagacaggaggtcttattagtgttttggttgaagttcccgctgcatccatcactgaagcctctcaaggccaccaaggatcgttatatccttctgttgaggatttgctgtacacctccaattccggaggtaacagttctggttgcaaggatatgactgatgctcaaagtaaggggaagtctgtcatgccctctgctgaaccactcgctcgtaacactgttcccagttttcgtccaagtcatccaaatgcatctggaaatgaatggttccagacacgaagatcggtggatggatg

SEQ ID NO: 10809 - DNA, 354 bp, Triticum aestivum
  Clone ID: uC-tsrow189118a07b1
agagcagcagagcggagggtccatctctatcctctgccgcttccgtttccgccgcccgctggagttggcatgggtgaggcgctcgggatcctcctgtatatactaatggtaggttttttgttgttgtggtggtattcggccttgtgctggtctggcgtgatgccgatggagtgttggccgccgtcgctcgcgcgcagcgttcggtggctgtcgacctcgtcttctgcttcgtctccttggtggaggcaaaagggaggcggcggatccgacgctagctcccccaataagcgcgtggctgcctcagttcgagccgctctggtgttctcccgtcttgcttctagccgtcatggtggc

SEQ ID NO: 10810 - DNA, 356 bp, Triticum aestivum
  unsure (1)..(356): unsure at all n locations
  Clone ID: uC-tsrow189118a08b1
cgagtactgcaataaggtgttttaaacttctctcggngaaggtgacgcggcgttgagatcgcgcctgatccggtcgagcgcggcgtgccggccaccttcaagatctccgctacaacagataaaaacatcaccgaggggaagctggttattgatgttaaatattggatcttcaatgtttactctgaaacggatgacatctgtacgaagacccaatgcccggcaacttctgattttgagctatctcactcgcaaaccttaccatcaatcactccaccgggttcttacaccattcagatgaagatgctcggaaagcacgatgaggaattgagctgcatctccttcgggttcaacattgg

SEQ ID NO: 10811 - DNA, 389 bp, Triticum aestivum
  Clone ID: uC-tsrow189118a09b1
cgtgatctcgatgtggcttcatttgatttttctcctgaggctgaagaaataattggggagccaaagccagaattcagcacagatgaagaacaaagtccaaagaaagatgaatcaaatatggcaggagagaaaacttatgatgagaaaacaaagggtgcacaggaagctaagagtctcactgacgaagcgaaaaccaaagttgaagaacaaggagtagtacagaaggcgtcacacaatcagaaacgtgatctcgatgtggtttcaccaacagaagctcctgggactgaagaaaatgttgtggatataaaagagccagagttcagcacagatgaagaacaaagtccaaagaaagatgtatcaaacatggcagaagagaagagttatgaaaa

SEQ ID NO: 10812 - DNA, 270 bp, Triticum aestivum
  Clone ID: uC-tsrow189118a10b1
tggcactaccagagccgccgtttccttatcacctacgagggcatcatgtacccgctccgcgtcaccgacgagctccagcagtggcccgagatggcgtcccgcaagcgcacctgggcaactgtgcagcaggtcatggagggatgccagcactgctggatgcgggaggcgctcgaggagctcgtcgcccggcacgccaagccgcagtccgccctgtgagcagccaagcgggctggcggggtgactggagctcgagcgcgcgcgactctcgcg

SEQ ID NO: 10813 - DNA, 154 bp, Triticum aestivum
  Clone ID: uC-tsrow189118a11b1
ggcactttgatttgcttagcgcgcgacgaagcaagcaagctaagtgagcgcgatggtggtgctcatggagtacgcccccggcgtcggcgtgaccatgaagaggaagggcgaggaggagccggggctgttcgcgttccccgacgacggcgacggc

SEQ ID NO: 10814 - DNA, 276 bp, Triticum aestivum
  Clone ID: uC-tsrow189118a12b1
gttcagttgcataactcacttccaattaagcaagagctgcgaaatgggtccatggtgtctgttaaacctcttcataccccacaggcacctacaaatgtgcttgacagtccaatggctgctgccaagcattcaccaaaggcaaaattatctggaaatgattgttttgcatgtgtcggatctgatcctcagaagtgggcttcagctgagaaatttcagcctacttcaaagtcgagtggtcaactaaaggcacatggctctagtaatgcggagaaacat

SEQ ID NO: 10815 - DNA, 151 bp, Triticum aestivum
  Clone ID: uC-tsrow189118b01b1
tcgatcggaatcgatctcatgtggcagctctgcccatccatctgagatcgattgatcgatcgccaggtgtgtatacccgttaatttccatgggaggcgacggcaagttgggtgccgccgaggccgccgtctgctgcatgtgcggcgaccat

SEQ ID NO: 10816 - DNA, 314 bp, Triticum aestivum
  Clone ID: uC-tsrow189118b02b1
atctgccctctctctctctgtcgtcctctgtgatacgatccgcgatggctttccgggcgcggaggaggagcgcggcggcgagggccccggcgcacctgtgcctgtggctggcgctcgtcgccgccaccctggtgctcgcccagggtaagaagtcgaacctgtcggaggtgacgcacaaggtctacttcgacattgagatcgacggcaagcccgcaggtcgggttgtcatgggacttttcggcaaggctgttcctaaaaccgcagagaacttcagagcactctgcacaggagagaaaggcatgggcaacagcggc

SEQ ID NO: 10817 - DNA, 321 bp, Triticum aestivum
  Clone ID: uC-tsrow189118b04b1
cagcggcagcgcaagaggttgtttgttattatcaccaccaccactcattatacggcggccgagactttcctcttcacctctgagtctgtgaacgagggccaccctgacaagctctgcgaccaggtctctgacgctgtgcttgacgcgtgcctcgcccaagacgctgacagcaaggttgcctgtgagacatgcaccaagaccaacatggtcatggtttttggtgagatcaccaccaaggccactgttgactatgagaagattgtgcgtgacacctgccgcaacattggcttcatctctgatgatgttggccttgatgctgac

SEQ ID NO: 10818 - DNA, 255 bp, Triticum aestivum
  Clone ID: uC-tsrow189118b05b1
cccgccctgcgccctgctgttcgtacagatcacacgcctccggtgcggcggcctggtgctcggccaggcgatgcaccactcgatcgtcgacgcgcgcggcgccgcccacttcttcgagacgtgggcgagcatctcccgcggcggaggcgcgcccaccgtgtcgccgtgcttcgaccacacgctcctcgccgcgcgcccgccgcagtcgcgggcggtgctgtacgaccacccggagtacaagccggagccggagcc

SEQ ID NO: 10819 - DNA, 293 bp, Triticum aestivum
  Clone ID: uC-tsrow189118b06b1
cgctcacccggaacctccccgtggcttttttcggtcgcccgagacctccccgtcgccgccgatctaccggagcctccgctcgtctccccgctgatatcctcctcctcctcctcctcgccggagacaacatgtcgacgcttgccgcggcgagggccgacaacttctactacccgcccgaatggagcccgaagaagggtgggctgaacaagttccacggccaacatgccctcagggagcgggccaggaagctggatcagggcatcctgattataagattcgagatgcctttcaat

SEQ ID NO: 10820 - DNA, 316 bp, Triticum aestivum
  Clone ID: uC-tsrow189118b07b1
tctcccctgcctctctccagtgtactcatgtcccccaccaccgaagctcttaaccccacccgaagcggcagccatggcccccaaggcagacaagaagccggcggccgagagcaaggtggagaaggcggccgagaagacccccgcgggcaagaagcccaaggccgagaagcggctgccggcgggcaagacggcgtccaaggaggccggcggtgagggcaagacccggggccgcaagaagggcagcaaggcgaagaagggcgtggagacgtacaagatctacatcttcaaagtgctgaagcaggtgcaccccgacatc

SEQ ID NO: 10821 - DNA, 356 bp, Triticum aestivum
  Clone ID: uC-tsrow189118b08b1
ttccaagctccatctcgctgtgtgcccgtcattgccaacacgccgccgttttcctttcccaacacgcccagcggccccctcttgcatctcccctgagccgccttcccccgacgacgacaccattggcggcacggccgcgagacgatgattcagcgcgggcgacggcggtgacatggtcgagtagcggcgccgaggaccatgccagcggccgtatccgcgtagagggagatcgaagatgaggaatacgcagcggaaaccatctattctcaacttcgatgctggatgcggatcttccttgtcttttattgtaataggcttggtgggatgcaccctcattgtctgcctatttttcatca

SEQ ID NO: 10822 - DNA, 307 bp, Triticum aestivum
  Clone ID: uC-tsrow189118b09b1
acaggagttacaactattgttgttggtttttcaagcagaggagggcatgttgatggaccaagtgacgatgcaaaattttctactgattttgaagtccgttacattgccagtagctgctcccttttggtgattgacagaggaaatcaagctattcgggagattcagctcaactttgatgactgtgtgtaccagtatgaagctggttttcctctaggagtagcactgcttcttgctgctgctttcttcggctacatgcttgcattgctccaacgccgggttttagggatggtatcaacagaagatgaac

SEQ ID NO: 10823 - DNA, 303 bp, Triticum aestivum
  Clone ID: uC-tsrow189118b11b1
cacaattggttgcaacactgatcgttgtctatgccaactgggacttctcacggatcaagggaatcgggtggggctgggctggtgttatctggctgttcagcattgtgttctacttcccactcgacattttcaagttcttcatccgatttgtgctgagtggaagggcctgggacaacctcctgcagaacaagactgctttcaccaccaaagagaactacggcaaaggggagagggaagcacaatgggctaccgcacagagaacactccatggccttcaagcaccggagccggcctcccacacac

SEQ ID NO: 10824 - DNA, 234 bp, Triticum aestivum
  Clone ID: uC-tsrow189118c01b1
ccaatgcgagcttgttggcggtgatcatggcgtgcacactcctcggaggccacacgtgccacggcgcacgccacttggccgacaccaccccggcggctgccccacccgctgcggctgctgtccctggcctcccggccctgcctaccatgccgaccctgccaccgatgccggctgtgccaacggttccggccgtgacagtgccagcaatgccgtcggtgcccacggggatcgtgc

SEQ ID NO: 10825 - DNA, 296 bp, Triticum aestivum
  unsure (1)..(296): unsure at all n locations
  Clone ID: uC-tsrow189118c03b1
gcctctgaatccaaacaaatggaaatttcaaggntgttgctaccgttgttctcggcggcggaaagttctatgcccagacagtaggtgaccagagagtagcttccatccaacaacagcttgcatccttgaaacttaaggaggcaccagtcattggtgcttttaatcctgggaagggagaaatagtccttgctcagtttagcctcgacaactcttggaatagagccatgattgttaatggaccccgaggagctgtagagtctgtagatgacaaatttgaagtattctacattgatttt

SEQ ID NO: 10826 - DNA, 372 bp, Triticum aestivum
  Clone ID: uC-tsrow189118c04b1
caggagctaaagcgggtcctttggttttatcgagcacttgactttgtgtaacaggtagcgtttggaagggatgagagacaagtgatcattgcaatttttgtgggaacattgcccaagatggcgaagtgcaggatctgccgccactattggagacaccttgtcaagcaccacggctacgcagatcgaagccgctgtcacgtgccgaagagtcaccatcgccagccatcggtttcttctgcggcaatggctaatccagcccaacttcaggcgcgggccggtctccgtcgacaagcaccgtcttctgccacaagaaccgccacccattccgaatcccagcagtattttcaggtccactacaccaaagaaaagctg

SEQ ID NO: 10827 - DNA, 300 bp, Triticum aestivum
  Clone ID: uC-tsrow189118c05b1
atcgagacaacccgtgaagcaagtcctacttttatcattgggaagtttgatggtatacttggccttggatttccggagatttccgtgggaagtgcccctccaatttggcagagcatgcaagagcagaagctgatagagaaggacatcttctccttctggcttaaccgtgatcccgatgcatccgcgggaggtgaactcgtgttcgggggtgtggacaaaaagcactataaggggaaacacacatacgttccggtcactcgtaaaggctactggcagtttgacatgggtgatcttctcatt

SEQ ID NO: 10828 - DNA, 352 bp, Triticum aestivum
  Clone ID: uC-tsrow189118c06b1
gggtgcggcgcccgcgtcggcgtcattcttaggtcctgcagccttcctttagcgctaaggacaggccagcaatctccatgatcgaagatgcggagaagaaggggctgataaccccaggcaagacgacgctgatcgagcctacatccgggaacatgggcatcggcctggcgttcatggctgcactcaaagggtacgagctcgtgctgacgatgccatcatacaccagcctcgagaggagggtggtcatgaaggccttcggtgcgcagctcgtactcactgacccggcgaaggggatgggaggcaccgtcaggaaggcaacccagctctatgagaaccatcccagcgccttcat

SEQ ID NO: 10829 - DNA, 334 bp, Triticum aestivum
  Clone ID: uC-tsrow189118c07b1
atgatgggttatcagacaatgcatatcttcttgtagcagaagttctgtaacagattgtagctttggctcctttcatctgttgccatttcataaatgagctttcacgttcgatgcaaaatttgactgtttgtgccatgaacgagcttcacttgtatgaagattctgaaaaggcaattctgagcacatcatcagccaacggcatggcagttctaagagttgtgcaggccttgagttctcttgtcacatctctgcaagagagaaaagatccagagcttcttgcagagaaggaccattcagatgcgctgtcccagatttctgatattaacacagcatt

SEQ ID NO: 10830 - DNA, 284 bp, Triticum aestivum
  unsure (1)..(284): unsure at all n locations
  Clone ID: uC-tsrow189118c08b1
gacattgggttctctctgaatgcagatttttggnctagtttctctgatgtccagatggcgcggaacaaaagaacccggccaaggctagcttattttgtactaccacaaaagaaggaagggatctgcacaaaattctgaattgagagtgaaggtgttgccatctaccgtcgatatgcgacactgtatttaccagtgtgccctagtttttctaatcgaattaagagcgtccccgcgtagggaggacacatgctaacagggggggtcctggttttggtggttcgact

SEQ ID NO: 10831 - DNA, 344 bp, Triticum aestivum
  Clone ID: uC-tsrow189118c11b1
ttttgcttgtaaaaaagaagcctgatatttttagcatgattcaccccatattacaacgacaatatctttaggtaaagctgcggggccgccatggcagagcagctacacaatcaacaacaacgccacacgtcgatcaacaccaacgcacgaacaacgaaaggcaaaaggcgacaggaattgaagaagaagaacatgcacgaacgaattaagcgtcttatttttggatgtactctggaagcctcctcctcctctcctccacggtggccccggcgatgcttcagacgttgatgggcaggggctcgccgttccactccttgaggcactccagcatggggtcgatgagc

SEQ ID NO: 10832 - DNA, 327 bp, Triticum aestivum
  Clone ID: uC-tsrow189118c12b1
gcaagccggagtacaccgacctcttgttttacaaactgaagcaccaccctgcgcagatcgaggccgccgccatcatggagcacatccttgaaggaagctcctacatggcactcgcaaagaagctcggcgagcttgacccgttgatgaagccaaagcaagataggtatgcgctccgcacatcaccgcaatggcttggcccccagattgaggtcatccgtgctgcaaccaagtcgatcgagcgggagatcaactccgtcaacgacaacccactcatcgacgtctcccgcggtaaggccatccacggtgggaacttccagggcacaccta

SEQ ID NO: 10833 - DNA, 380 bp, Triticum aestivum
  unsure (1)..(380): unsure at all n locations
  Clone ID: uC-tsrow189118d01b1
gagtatgttccatatgcttgtgcnctagacaagagtctgacagttgttccagcagcccagaactggatccagcaccagggagatgtgttccatttcccaggaggcgggacaatgtttccaaatggagcaagctcttacattgatgaacttgcatcagtcattccacttgctgatggcaccattaggactgcacttgacactggatgtggggttgcaagctggggtgcttacctaatggatagaaatatattgaccatgtcatttgcacctcgagactcacacgaagctcaggttcaatttgctttggagcgaggtgttcctgctgtaattggagtgcttgggactatgaagctcccatacccatctagatcttttgatat

SEQ ID NO: 10834 - DNA, 281 bp, Triticum aestivum
  Clone ID: uC-tsrow189118d02b1
ccgattacatcataacgacaaaagcgttcgttacagagctggttgactctatgaaaagagtcttggataggttctacggggaggatccgttgcaatcggcggacctgtctcgtattgtgaatattagccatttcggacgattaacgaagttgatagacgacaaagaagttgccaccaagattcagctcggtggccagacagatcaggagcaactaaaaatagctcctacggtgttggtagatgttcctcttgatacagcacttatgacaggggaaatattt

SEQ ID NO: 10835 - DNA, 281 bp, Triticum aestivum
  Clone ID: uC-tsrow189118d03b1
tcgctcgctcgctcgccggtgtctgtttttgcgatcgactccgggtgcttcagccggagcggacgcctctctgcccgctgagctccctcgcgcccctcctcgtgagctcgaaatacatgaagatgtcggaacattctgagagcacggctgaaaagctcatgggcaacatcatggataccattgctgacaagctccctaagcagaagtctgacaatatcatgagcaacatcatggataccatttctgacaagctccctaagcagaggtctggccggttcgat

SEQ ID NO: 10836 - DNA, 298 bp, Triticum aestivum
  unsure (1)..(298): unsure at all n locations
  Clone ID: uC-tsrow189118d04b1
ctgcccgctcgaccacacctggaagttcaacgacctatacatcgttttttacgggggcagcgccgnctcgccggcctccgggccggcattttccgcctggtagagggagcgcccgtagctgcactgactagacacagtgattcttttgttggttgggcggttcttggcaatggcagtgccgctgccgtcggctgtacagggcggcgagggagggtcgccggcgattgcggcgcgaggaggagggaggagaggagtggtggatagagaaaaagaagagcttgttctttttggtagaaat

SEQ ID NO: 10837 - DNA, 198 bp, Triticum aestivum
  Clone ID: uC-tsrow189118d05b1
gagacgccgacgacgcgggcgcgcgcgcccgggccaccgaggccgtgcgcgaggcgtgccaggccaccgggttcttccgcgcggtgaaccacggcgtgccgcacgagctcatggcgcgcgcgctcgatctgtcggcggcgttctttcgcgctgccggacgaggagaaggccaaggtgcggcccgccgagggcgccttc

SEQ ID NO: 10838 - DNA, 418 bp, Triticum aestivum
  Clone ID: uC-tsrow189118d07b1
gacgcgtgggtttggatcctgcagatgtattctactcttccttcttcttcttccctcacctctgtttaatccatgatgagcaaattagcggcagcattgtgcatgcagcctcaatcaacaagcaaaccggcagtgcagagaaatcatctccagatactcccatgaattcagcaagcacaaccccaagatatccgctgatgataatagacagggcaagtgcagacatgacaaaggccataaccgatccctcgcacccagaggggcaaaggcttgcgataagaacactgaagggtagcaccttgaagaacatgaggccctctagcagccctgagaacacaatggtgtataaggagtctgatattcccacctttctgtatactccctgaacaaataacacatctgacaacattacaacagc

SEQ ID NO: 10839 - DNA, 353 bp, Triticum aestivum
  unsure (1)..(353): unsure at all n locations
  Clone ID: uC-tsrow189118d08b1
accacggcacggcacaccgtggcgtcctgatccgaggtttttcgtttgtttccctccgacacgctgngacatagcctcttgatagcacaccaaatcaagagctcagcatggctgattccatggcggattcgatggtggcaagcttctgggggccggttacatcaaccaccgagctgtgcgaggagaactatgcgcgctcgtcatacatcgcagagttctacaatactctctctaatgccccttgcattcttttggcgcttattgggctcgtgaatgctctccgccagcgtttcgagaagcgcttcagcgtcctgcacatatccaatatgatactttctattgggagtatcatc

SEQ ID NO: 10840 - DNA, 275 bp, Triticum aestivum
  Clone ID: uC-tsrow189118d09b1
cgcgctcaatctcaatctgaccgttgtttcgccgccaaacacgaactgtcaggcggcaggtgcccagccacgctagccagatcctcctgcaaagaacagaaatcccccggttatttcccactccgctccactcgtccgaaccacgccgcgctagccagctgcatcttcagccggcatggcccgcctcggcctccggcgctttccgccgctgatgctcctcctcctactcctcttcaccctcgtcgtcgcggaggtggcggcggggaaggggaaag

SEQ ID NO: 10841 - DNA, 342 bp, Triticum aestivum
  Clone ID: uC-tsrow189118d11b1
cctcctgtgtgcggcgccgccggtgcgtagaggccacatctcctctttctcctcgacatctgcggccaaggcgctcacttctccggccctcctccacatctcctcgcctccaccccatccacttcctgtcgaagactgcggcaacggagctcggcggctgcggcccttctccaagactgcagcatggtgctcggcagctgcggcaacggagctgatggagcgcgagccgaccagttcaacggaggcagtagcacggggcagcggcagcagcatggagggcgtccgcttgactggaaagagaatgtatttgttgatagtgagagtgaggataatgatggggtg

SEQ ID NO: 10842 - DNA, 265 bp, Triticum aestivum
  Clone ID: uC-tsrow189118d12b1
caccgaagaaggagaaggccccggcggcgtcgtccaagccggccaagtccggcggcggcaagcagaagaagaagaagtggagcaagggcaagcaaaaggagaaggtgaacaacgcggtgctgttcgaccaggccacctacgacaagctgctcaccgaggtgcccaagtacaagcagatcacgccctccgtcctctccgagcgcctcaggatcaacgggtctctggcacgcagggctatcaaggacctgatggagaggggactcat

SEQ ID NO: 10843 - DNA, 202 bp, Triticum aestivum
  Clone ID: uC-tsrow189118e03b1
ccgccatgaggttcgcgtgcttcggcggtgcggcggccgtggccgacgaggcggtggctgcgacgacgactcaccggactcctcgccgccggtggcggttcttcttcggtagcaagggcgagaagtcgccgtcgacggggaccaagaggatcacgtcgccaggccgccgggcaacggactacgttgcatacgacatgatcgc

SEQ ID NO: 10844 - DNA, 342 bp, Triticum aestivum
  Clone ID: uC-tsrow189118e04b1
gcttgatggaaccaagaatgtgtggtgtttttgcaagcaaacgcttgttgctcatgcaatcctggctgtgtcactagctgtttgcaaagctggagccagcgtcaagaagattccgctgtaccagcacattgccaaccttgctggcaacaagcaattggttttgcctgttcctgcattcaatgtcatcaatggtggatcccatgctggaaacaagcttgctatgcaggagttcatgatccttcctactggagctgcctcattcaaggaggcaatgaagatgggcgttgaagtgtaccacaacttgaagtctgttatcaagaagaagtatgggcaagatgccac

SEQ ID NO: 10845 - DNA, 243 bp, Triticum aestivum
  Clone ID: uC-tsrow189118e05b1
cgttgcgagatcgcaggaaatctgggcgctcggctcggcaggaagctatccatccaagaaaaagatttggcgaggcgaaggaaaggggagaggatatcgggagaggaggcgaatagacatggcttttgtgaggcagcgggcgatggggaggtggcggagatgagggatgctagcttctgcgatggattacctgagatcttgctggggtccgacgtcgtcgccggacgggcgccctcgcagggg

SEQ ID NO: 10846 - DNA, 321 bp, Triticum aestivum
  Clone ID: uC-tsrow189118e06b1
ccccgccaggcccctcccgctcccttttctcgctcgggtgcttcctccctccctctgtccactccactcgccactggctccgttcggtccgtgaatcttgaccgacccgcctgagccggcagccaccggtggcctgctgccgcctctcgctccagtggtggtgtggctacgagctgcggacggagggggtccgggatggagcggtacgaggtgatcaaggacataggctcgggcaacttcggggtggccaagctggtccgggacgtcaggaccaaggagctcttcgccgtcaagttcatcgagagggggcacaagattgat

SEQ ID NO: 10847 - DNA, 243 bp, Triticum aestivum
  Clone ID: uC-tsrow189118e07b1
gactttcagataatacatgtgtcaatttcgcagaatcatatcgagcatatgggcatcgttgacacgtagtgcatgacacattgcgcgattaagatgttcttaggccagctaagtaacataagacaacttttgtatgaagatcggttgttcggtttcactctgacagtttagaagcttttgtttggcgtttctctcggccggataatagagaaaaagagacttacgcaggcgacgaagatttca

SEQ ID NO: 10848 - DNA, 268 bp, Triticum aestivum
  Clone ID: uC-tsrow189118e08b1
tcatccgcggcgatacgatccattatggcgatgagggcgtggagtgttgagcgcggcggcgagggccccggcgcacctgtgcctgtggctggcgctcgtcgccgccaccctggtgctcgcccagggcaagaaatccaacctgtctgaggtgacgcacaaggtctacttcgacatcgagatcgacggcaagcccgcaggtcgggttgtcatgggacttttcggcaaggctgttcctaaaaccgcagagaacttcagagcactctgcaca

SEQ ID NO: 10849 - DNA, 416 bp, Triticum aestivum
  Clone ID: uC-tsrow189118e09b1
agcgtcgctatgctcagcacacttgttttagcaggtgggcacattgtttcaaccacagatttgtaccgcaagacaagaatttacatggagactgagctccccaagaggggaattacgatgactgttattagacctgctgacatggatgctcttcaagatgcacttgataataataatgtatctttattcttcactgagactcctactaatccatttctcagatgcattgatattgagcttgtctccaatatgtgccataacaagggagcattgctatgcattgatagcacctttgcctcccctatcaatcagaaagcactgactttaggtgctgacatagttgttcattctgcaacgaagtatattgctgggcacaatgatgttattggaggctgtatcagtggcagggacgagct

SEQ ID NO: 10850 - DNA, 391 bp, Triticum aestivum
  Clone ID: uC-tsrow189118e10b1
aaatcaaaggttctagttgaggtgttttcagaaggcaaatatgtattttatattgataagagcatcgatatcacaaaaatcacaccttcaacaagagttgctcttcggaatgatagctatatgcttcatttggtccttccaagcaaagttgatccactggtcaatcttatgaaagttgagaaggtcccagattctacatatgatatgattggaggtcttgatcagcaaatcaaggagatcaaagaggtcatcgagcttcctatcaaacatcctgagttatttgagagccttggaattgcgcagccaaaggttgtcctcctttatggaccaccagggacaggcaaaacattactggcacgtgcagttgctcatcacaccgactgtaccttca

SEQ ID NO: 10851 - DNA, 319 bp, Triticum aestivum
  Clone ID: uC-tsrow189118e11b1
cgtactgccttgtggaccgtgcctcgttttttcaactccgtctcccgctcttccaccgagaccttcggctccggcgccctaggctccacggtcgcctcgtccttcaccccgatggtcaagaaccctcggatggagacgttctactacgtgcagctcatcggtatcagcgtgggcggcgcgcgcgtccctggcgtggcgaactccgacctccgtctcgacccgtcgtctgggcgtggcggcgtcatcgtggactccggcacgtccgtgacccggctcgcccgcccggcctactcggctctgcgcgacgcattccgggggg

SEQ ID NO: 10852 - DNA, 334 bp, Triticum aestivum
  Clone ID: uC-tsrow189118e12b1
cgccgaaatcccccagatctcgctccttctttagcgcggcaatggcatttgtggacgccggcgaggggcaggcagcgccggcgcccagggccaccgtctcacacgtcatcttcgacatggacggcctcctcctcgacacggaggggttctacacggaggtgcaggagaagatcctcgcgaggtacggcaaggtgttcgactggtccctcaaggccaagatgatgggcaagaaggccaccgagtcggcgcgcatcttcgtcgacgagtgcggcctcgccggcctgctcaccccggagcagttcctcgaggagcgcgagggcatgctgcaggagct

SEQ ID NO: 10853 - DNA, 276 bp, Triticum aestivum
  Clone ID: uC-tsrow189118f01b1
tttggtgctagactacttgttgtttattcactcctgttgcctggggtgccttcaaaggacccagaaacccagaaagatgttggcaaggctgataagtcaggggacaaggcaggtggtgagaaattgacaattcttcataagcatcgctcttccttggcagacacaatgcacttcagaagaccagctgcaccaacttccagtgtgaatgctgatattgtgggtacatccactctacattctgcaactttgcccaaacaggagtcctcaacagctaca

SEQ ID NO: 10854 - DNA, 239 bp, Triticum aestivum
  Clone ID: uC-tsrow189118f02b1
caaaaccctagccgtcgcgtcacattttgacgccgacgcagcgagctcttcctccaccgccgcaaccatggcgacccagatcagcaagaagaagaagtttgtgagcgatggcgttttctacgccgagctgaacgagatgctgacccgggagcttgccgaggacggctactccggcgtggaggtacgcgtgaggccgatgcgcacggagatcatcatcagggccacgcggacgcagaacg

SEQ ID NO: 10855 - DNA, 169 bp, Triticum aestivum
  Clone ID: uC-tsrow189118f03b1
cagacagatccgatggccctcgctctctccggctccgctgctgcccgcgcgctcgcccagcggctggccccagccaccgccaggggctacgcggcggcggcctcctccggggcgatgaggcgcggcgccgcggcgaccgcggacgggaaggcggccagggaggctgaga

SEQ ID NO: 10856 - DNA, 241 bp, Triticum aestivum
  Clone ID: uC-tsrow189118f04b1
gctaagtcctgctttctttctcccttcccgttcttacgtttcagtccctgtagcttcttttttccttacagtctactccccgttccgttgcaaaaagcccctgagctctgtcacattctagcctcgactccttggtcttgggaggagttcgtcgcagatccgatctagagagcctccccgcaccacccatgtttaccttccccttcctctgacggccgccgtcccccgatgaagctgcgcg

SEQ ID NO: 10857 - DNA, 336 bp, Triticum aestivum
  Clone ID: uC-tsrow189118f05b1
accttgaggcagcatcggactttgtttttctttgaatcaaacactgtggatacagctaaagaccccttcgacttttcttccactggcaattttggcaaagcagatgtagcacctttggcagctcccaaaactgatgcgtctgactttggtgccttcgttgcaaacactgtagaagcaactaaagacccctttgatctttcttcaagtattaatggaagggcagaccaaacacctttggctgctcccaagcccaacaccaagaaagaaaattttcaggttaaatctggcatatgggctgactctttgagccgtggattaattgatctgaacataact

SEQ ID NO: 10858 - DNA, 355 bp, Triticum aestivum
  Clone ID: uC-tsrow189118f06b1
cgagcagattcgcgccggactcgcgactatttttgatgagataagccctctgccacctcggggttcgcgatgctgcggaaggcggccgtcgggttcctcgcctgcctcgtgctctacctcgccttctcctcctacctccgtagccagagggctgcatatgttcagttaccagcggttactcacagggtatacctggacgtggaaattgatggccaaaatataggtagaattgttattggtctttatggggaagtggtgccaaaaacagttgaaaattttagagccctttgtacaggtgaaaagggcgatgggcccaagggtaaacctcttcactataaaggaacaccatttcatc

SEQ ID NO: 10859 - DNA, 261 bp, Triticum aestivum
  unsure (1)..(261): unsure at all n locations
  Clone ID: uC-tsrow189118f07b1
gagcggcagcgcccgatcggttattctcgcgatggctggcggcggccgcgggttcctcaacctggagcggcacttcgccttctacggcgcgtaccacagcaacccggtcaacgtcttcatccacgcgctcttcgtctggcccatcttcctcaccgccctcctgctcctccacctcaccgccccgttcccgcgcgccgncgcggtcttcaccgccgtctacggggccttctacgtctccctcgaccgccgctcgggcgccct

SEQ ID NO: 10860 - DNA, 300 bp, Triticum aestivum
  Clone ID: uC-tsrow189118f08b1
cctgctgctatttccagccttttttcactaagcgcccaacggtcgcccgcccggccggcctcatctcgaagcgacattagcttgcatattgtgttgcagcactcaagcagcaacccgctttccagccgctgcctgacttataatagtctgccgtcttcccgcttctcatcagcaaagcatctgcatcgactattccgccttttgtcctttccgctctcggcttcatctctggttcaactgtcatcggcatctggtttccatctcctcttccgacttatacaccaaccaagaatcatattc

SEQ ID NO: 10861 - DNA, 265 bp, Triticum aestivum
  Clone ID: uC-tsrow189118f09b1
ctgaccacctgacacacaagctaattttccaccctggacagatcgaggctgccgccatcatggagcacatccttgaaggaagctcctacatggcactcgcaaagaagctcggcgagcttgacccattgatgaagccaaagcaagataggtacgcactccgaacatcgccgcaatggcttggcccccagatagaggtgatacgcgctgccaccaagtcaatcgagcgtgagatcaactctgtcaacgacaacccactcattgacgt

SEQ ID NO: 10862 - DNA, 257 bp, Triticum aestivum
  Clone ID: uC-tsrow189118f11b1
aaatgatgctttcggcactgcacatttttctcatgcttcaaccgttggtgtaaccaagtttttgatgccttctgttgctggcttcctcatgcagaaggaacttgactatcttgtcggagctgttgccaacccaaagaagccatttgctgccattgttggtggatccaaggtctcatctaagattggtgtgatcgagtctctgctggccaaggttgatatcctcatccttggtggtggtatgatcttcacattctaca

SEQ ID NO: 10863 - DNA, 312 bp, Triticum aestivum
  Clone ID: uC-tsrow189118f12b1
cctccccctcggcgaaaccctagaattcatccggcgcggcatggcggacggcgagggcggcgcggacggcctggcggagaggctcgcgggggcggagatcgccgcgcacggcggcggcggtggcgaggaggagccgaagctctcgaagaacgcccagaagaaagaggagaagaggaggaagcaggaggagcagcgccggctcaaggaggaggagaagaagagcaaggcggcggtggctgcggtggcggccggtggagcgccccagcaggcggcggccgacgatgaggacatggatcctactcaatattatga

SEQ ID NO: 10864 - DNA, 181 bp, Triticum aestivum
  Clone ID: uC-tsrow189118g01b1
aaggtggagccggggctgagcgcgtacgccggacggccgcaggaggcggccaagtccatcgtgcctctgctggagaaggccaagagcaccgtgcctcgctggctcatgaagaaaactcccgtcaaactaggggcgacggctgggctcaggctcatcggagacgagaaagcggagcaaattc

SEQ ID NO: 10865 - DNA, 193 bp, Triticum aestivum
  Clone ID: uC-tsrow189118g02b1
gggcctggcggccggcgcggcgcgggcgtccaacgaggagggggacgcgctgtacgcgctgcggatgcggctgtcggaccccaacggcgtgctccagagctgggatcccaccctcgtcaacccctgcacctggttccacgtcacctgcgacaccgccagccgcgtcgttcgactgtaagcgacagcccttccc

SEQ ID NO: 10866 - DNA, 217 bp, Triticum aestivum
  unsure (1)..(217): unsure at all n locations
  Clone ID: uC-tsrow189118g03b1
cttcttcctctccaagctacattctcggccatggcggcgacgatccagtccgngaaggcccgccagatcttcgacagccgcggcaaccccaccgtcgaggttgatgtgtgctgctcagatggaaccttcgccagggccgctgttcccagcggtgcatcaactggtgtttatgaagctttggaactgagagacggtggatctgactacttgggaaagg

SEQ ID NO: 10867 - DNA, 320 bp, Triticum aestivum
  Clone ID: uC-tsrow189118g04b1
acgtcggcgtcgcggaagcgtgcttttggcagtggcctgcgtggcgccacgtcttccgcggtcgctacggccgccgcaaccgcatctcgtcgatcgtgtcggaggagatgttctcgagcctgttcctgcacaaggacgacacggcctgcccagccagtggattctacaactactcttccttcgtcagcgcggcggagtggttcccggagttcggcagcggagcccaccacgtcgactgggacacgcgcaagcgcgaggtcgcggccttcctggcgcagatctcccatgagaccaccggcgggtgggcgacagcgcccgac

SEQ ID NO: 10868 - DNA, 304 bp, Triticum aestivum
  Clone ID: uC-tsrow189118g05b1
tgcccgggcttaacaagccgggcatgtagtaacgctcatggctcggctgtgacaccggtgacggtgcggcagctgccggggctgaacacgctgggcatctcaatggcgcgcatcgacttcgggcccaacggcgggcagaacccgccgcacacacacccccgtggcaccgagatcctcaccgtgatcatggggcagctgctggtggggttcgtcacctccaaccagcaggacgggaagaacctgctcttcaccaagcagctggtggagggcgacgtgttcgtgttcccacaggggctcatccact

SEQ ID NO: 10869 - DNA, 297 bp, Triticum aestivum
  Clone ID: uC-tsrow189118g06b1
ctgctcaccattccaaggattctcgatctttctgaagagctgcgcatgtctctcgctgctgtgaagtactcccgtgggatgttcatcttccccggtgcacagcctgctccccacaggagcttctctgaggaggttgatgtcctgaaccgctactttggccacctgaagtctggtggcaatgcctatgtgattggagacccagcgaagcctggccagaagtggcacatctactatgccaccgagcaacctgagcagcccatggtcaccctggagatgtgcatgactgggctcgacaag

SEQ ID NO: 10870 - DNA, 255 bp, Triticum aestivum
  Clone ID: uC-tsrow189118g07b1
gaaccagctagcaatgggcgaatcttctcagaaacaggcacggcttcgacaatgacgacgcgacggcgccgccctcgctgccggagacggtgtactacgaggggtgccccggctgcgccatggagcgcaagaaggagaacagcacgggcacgccctacaaggagtttttctacgtcggggtcaccaccctcgcctccgctctgccaatatcagcactgttccccttcttgtacttcatgatacaagatatgcatg

SEQ ID NO: 10871 - DNA, 123 bp, Triticum aestivum
  unsure (1)..(123): unsure at all n locations
  Clone ID: uC-tsrow189118g08b1
tggctcgtgcatgcatgcttgataaacttgngattgatcaatgatcagcgcatctcgctatggtatctaaatgcatgattcatgtatttttacaaggatatacaaagttgtcttgacagtaca

SEQ ID NO: 10872 - DNA, 268 bp, Triticum aestivum
  Clone ID: uC-tsrow189118g09b1
cgcgtccgccaccattgagattgtcttgctgtttgagggcattgacttctactccaccatcacccgggccaggtttgaggagatgaacatggatctgttcaggaagtgtatggagcctgtggagaagtgtctcagggatgcaaagatggacaagagcaccgtgcacgatgttgtccttgttggtggttccactaggattcccaaagtgcagcagcttctccaggacttcttcaacggcaaggagctgtgcaagagcatcaaccctgat

SEQ ID NO: 10873 - DNA, 400 bp, Triticum aestivum
  Clone ID: uC-tsrow189118g10b1
agaggaaatgcgatgcgagcgagagttttctagggtttacactctcctcctatcccgaatcaaaggagagaagcactctcctccgctgcggaccgaggccgagcggcggcggagataccatcctctcccacggccggccgtgctcaagctgaatttgttcaatggaggacctaccggaggctctggtgacggagattctcaagaggatcaccaggacaagtgatctgaattctctttcccttgtctcaaagcagctctacaagatagaggggaatcaaaggggtgctatccgtgttggttccggtctttgcactgctacagaagcactaacatcactgtgcgccaggttcacaaatttgcagaaattggaaattgattactctggttggatacttgaaca

SEQ ID NO: 10874 - DNA, 312 bp, Triticum aestivum
  Clone ID: uC-tsrow189118g11b1
gaagatagggggagagatagatcgatgtttgacgaccatggcgccaagctggtgaagagcctgcggggcgcggcgcagaagtacgtcggcgtcggcttcttcctcggcttcttcctcgtcctcctcacctacttcaccctctccgagcagttcgccatcgccgcgcccaacgctatccgaaggacctcagcggcgcacccgacgccgaccgccccggccgtggcagagaagacggtgcagcagcagcagcagctccccgtcaaaaaggaggaagcacctctgccggagcatgaacaagtacaagagaagcca

SEQ ID NO: 10875 - DNA, 233 bp, Triticum aestivum
  Clone ID: uC-tsrow189118g12b1
gcgtggtgccaatgccggcatcatgtgttttgctcgtccgcctcttcttctcacgactgcttcatcaggggttgcgacgcctctgtgctacttgacgtggccgaccctagcagcgccacggagaagttcggccccccgaacctaagcctgcgaggcttcgaggtgatcgacgcggcaaaggctaggatcgagaaggagtgcgggaacgtcgtctcatgcgccgatgtcttagc

SEQ ID NO: 10876 - DNA, 283 bp, Triticum aestivum
  Clone ID: uC-tsrow189118h01b1
tggaaggagatagtggacttttgggtgcggcttcacaacttcggcggcgatggcggaaactcgatcctaactgatggtgactctcctgagaagactcaaggcaaaagctaccaaaatgcccgggtttcagacttcaagtatacgcccagcccaccacagaggcacagtggttcagagcggtctaggaataacaatgggttcgagtcgacactggagaggcgtagagcaagccctgctcccacgtatcatacgaagcagaacaatgtcaataactatacaacta

SEQ ID NO: 10877 - DNA, 164 bp, Triticum aestivum
  Clone ID: uC-tsrow189118h02b1
caaacacggttcctgcttcctcggctcccaccttgagagggtggtcaagcccaatgtgaagctcctggcagagtgcgggctaggtgcttgtgatattgccaagctgttcattcaaataccgatgatcttcaccgccagcccagagcgtgccctggagatggtcg

SEQ ID NO: 10878 - DNA, 238 bp, Triticum aestivum
  unsure (1)..(238): unsure at all n locations
  Clone ID: uC-tsrow189118h03b1
ctcatcagatcagtttgtgngtacacaagcactatctctattttttccagcctcagccactccgggcattttcttgcatccacgacggcaatggccaccgctgatgtccagaacccgacggccgcgctgacggaggaggcgcccgcggtggagacgccggtggccgccgaggaggccccgaagacggaggaggtccccgcgccggcggaggccgaggtcgaggcgtctgcccccgtcg

SEQ ID NO: 10879 - DNA, 366 bp, Triticum aestivum
  unsure (1)..(366): unsure at all n locations
  Clone ID: uC-tsrow189118h04b1
agagtccttccccgagcgcgttagntttggtggatagccgccgccggttccaccgccgcggctcgcccagtcggncgaagcctccgctgcgcggtcgcaggcacaggatcccaacagcgcctccctccgtcgggcagccgttcccaccagcagcgcctccctccctggagcaggcgctcccgcccagcaacgccggcgcccggagcaacgccgccgaccagtccatagggcatcaacattgtcaattggaggggcttggagctgcttcggcatccacagtagagcaaacaagaaggtgccaggtgttgattggagatgaatgccccggaccgctatgagcgcttcgtcgtgcctgagggcacaaag

SEQ ID NO: 10880 - DNA, 267 bp, Triticum aestivum
  Clone ID: uC-tsrow189118h05b1
ccgccggcctcctctatgccccttcctctccctctcggacgaggcctagctatggccacccgtgccgcatcctgcatctggcgcgggagcgtgtggtggtgactagccgagccgtctcgctggtggctcgagcacggacccttgcgacggcgtccgggcgaggccgggcacaaggcggagctgcggccggcgacccggcacccgcgcttgcccggcggcgggaccgtcttcgtcgtggccggtgggagagttgggcggcagcaagcg

SEQ ID NO: 10881 - DNA, 363 bp, Triticum aestivum
  Clone ID: uC-tsrow189118h06b1
agcagagagagaaacggaatctgatttttagaagacttgcagaggatagtgagcaagccgcggaggaggcagcggcaagggaggaggggtcgccggaagggggacatgctccctccacatctcacatctcgcagcttgaactgagagcaagagtagaaacccataagatgagacgcaagcaaaatatgcatgaaaatggcacaatcatgattcagtttggtcagcaagtgcctaactgcgagtcctcagctagcgattctcctcaagaagtgtccgggatgagtgaaggaagctttaatgagcagaatgatcaatctggtaatcgcgatggctacaccaagagtgatgaaggcaagatgatgt

SEQ ID NO: 10882 - DNA, 216 bp, Triticum aestivum
  Clone ID: uC-tsrow189118h08b1
cgcctcggccagtcgtctgcgtttcttaaaccctaaccctagcctcttagctcaggcgacgctcgcgcctccaaatggacgggggaggcacgcatcgcacgccggaggacgtgttcagggatttccgcgcgcggcgggccggcatgattaaggcgctcaccaccgatgtggagaagttctaccagcagtgcgacccagagaaagagaatctatgtc

SEQ ID NO: 10883 - DNA, 277 bp, Triticum aestivum
  Clone ID: uC-tsrow189118h09b1
gatccaaccaatcccggttttttctacgagggtgtttctccgctctactcgtcgacgagatcatggccggaaaaggagacgggccggcgatcggcatcgatctcggcaccacctactcctgcgtcggcgtctggcagcatgaccgggtggagatcatcgccaacgaccagggcaaccgcaccacgccgtcctatgtcgccttcaccgacaccgagcggctcatcggcgacgccgcgaagaaccaggtcgccatgaacccgatcaacaccgtcttcga

SEQ ID NO: 10884 - DNA, 303 bp, Triticum aestivum
  Clone ID: uC-tsrow189118h10b1
cttgatcatttgatctgggcttagtgattactcggcagcaacggcaggcttcgcatccatcgcgctgttcctcgccgtgaacctggtcgtgttctccgtggccagcgcgtgcgggggaaactgcccgaccccgtccacgcccaccccatcgacgcccaccccgaccccgggctcgctcggcaggtgcccacgcgacgcgctgaaggtgggcgcgtgtgtcaacgcgctgaacctggtcaaggtccaggtgggcaggccgaccgcgttgccgtgctgcccgctgctggatgggctcgtcgacct

SEQ ID NO: 10885 - DNA, 305 bp, Triticum aestivum
  Clone ID: uC-tsrow189118h11b1
gtctctggttccctgtaacctacaccatttctttctttttcaagcgtgaggcatcacagctccttacttgctgcccttcataagcagctgatcggccacttatcagcaacaaagatgaagattggaaagactacagagatcctgaagaaagcggcggcgatgtgcaagagcaagaccaccaggctcctcatcctcgcctcgctccagcgtcgcaggatggccgctgccgccgtggtctctcacaagatccacacgcgcattgtggctgaccgaaatagagtggactgccacaagcctctcgcgct

SEQ ID NO: 10886 - DNA, 305 bp, Triticum aestivum
  unsure (1)..(305): unsure at all n locations
  Clone ID: uC-tsrow189118h12b1
ttcccctcctcaggcagctcctgctattgttcgggnccatctccgaggatgtcctctctggggtgctgtctggctgccatgtcttggcgaacttatatctgtcggagattcgtgaggtaggtagcctccgcatttgctcgccaactctcaggatcatcgtcataacttgtttgtttgaaggcaaaggagaattggtcattatggaggcccctcgccttgaaaggttgctgttacgtccgccagtcttaggtagtgagattatccgggttgttaaggcacctaaactggagatgttgggccttttg

SEQ ID NO: 10887 - DNA, 270 bp, Triticum aestivum
  Clone ID: uC-tsrow189120a01b1
cacacattccgtggaggattttggaattactttagtatgggtatggatgctcaagtgtcttatgggttccactctgaaaggaagaaaaatccagagaagtttaaaaaccagctaacgaatcagggtacatatgctaaacttggacttaaacaaggatggtttgctccttctctaacccattcttcttcaaggaacatttctcaacttgcaaaggtgaagatcatgaaaagacctggtgccaaatgggaagagcttaaaatccccagcagt

SEQ ID NO: 10888 - DNA, 267 bp, Triticum aestivum
  Clone ID: uC-tsrow189120a05b1
gtccgacccgcgcagctggggcgtcctcgtcaacagcttcgccatgttggacgaggactacgtatcagccttcatctcgttctaccagccggacgcgcgagcctggctggtgggccctctgtttctcgccgccggcgacgtgccggaccgcgtgggggagcaggaccccgaggggtgcctcgcgtggctcgaccagatggcggagcggtcggagtcggtgatctacgtgtcgttcggcacgcaggcccatatctccgacgagcagct

SEQ ID NO: 10889 - DNA, 289 bp, Triticum aestivum
  Clone ID: uC-tsrow189120a06b1
tgggctacgtctccaactacgccttggcgcgcctcccgatccacctcagctggcgcgtcatgctcggcatcggcgccgtcccgtccgccctgctcgcgctcatggtgttcggcatgccggagtcgccccgctggctcgtcatgaaaggacgcctctcggatgccagggccgtgctggccaagacctccgacacgccagaggaggccgtggagcgccttgaccagatcaaggctgccgctggcatcccgagggaccttgacggcgacgtggtcgtcatgcctaagacaaa

SEQ ID NO: 10890 - DNA, 227 bp, Triticum aestivum
  Clone ID: uC-tsrow189120a07b1
cgatagcttgggccggcgacagccaacggctcgggcgcgtttttgaccgaggtgggcattaatgacaccatcctccttggctacgactccaaccacgccttcgcgcgcctcaccatgcacctcatctggcgcgtcatgctcggcatcggcgccagcccggacgacctgctcgcgctcatgcagctgggcatgccgaaatggccccgctggctcggcatcaaaggaca

SEQ ID NO: 10891 - DNA, 341 bp, Triticum aestivum
  Clone ID: uC-tsrow189120a10b1
gcaaagaagataggaaagctaggctgcaggcacagttttcacaaatgcgccctgttccaatggctcaaactgttggtcctcgtatgcaaatgttacctcctggtgttccagttggtcagcaaatgttctatggccagccaccagcgtttattaacccacagcctggatttggcttccagcaacctttcatgcctggaatgaggccaggtggtgctccaatgccaaactttatgatgcctatggttcagcaaggacaacaaccacaacgcccagctggtaagcgagctggtgctggaggaatgcagcaatccatgcagatgggtcagcagcagatgatgggt

SEQ ID NO: 10892 - DNA, 285 bp, Triticum aestivum
  Clone ID: uC-tsrow189120a12b1
tcggtcaccggtcgccgccgggagcccagccgcccaggaggctccccgctcccgcctgtccttcccgcccgcctggacatctgcgccccctgcgagctgcggcgaccctgccctgaacggctgcgcccgtacccctggccgcctggcgcccctacaaagccggtggcagctgcccagtcaccagtccggtggcagcaaatcagtaacctgagaaaataaaaacttagtcatggtaccgtgagctcaccagatctgggccgagcctagaccaggcaccggggtgag

SEQ ID NO: 10893 - DNA, 127 bp, Triticum aestivum
  Clone ID: uC-tsrow189120b01b1
cggttgcagctgcggctcagactgcaagtgcgggaagatgtaccctgatctgacggagcagggcagcgccgccgcccaggtcgccgccgtggacgacctcggcgtggcgcctgagaacaaggcgggg

SEQ ID NO: 10894 - DNA, 212 bp, Triticum aestivum
  Clone ID: uC-tsrow189120b02b1
gccaccgaggccgcgctggtgctctctccggccatgcccctacccgtcttcaccggcgactcctccccgggcttccacgcggcgtcgtgcccgcagctggacggcatcgtgtggacgtccgaggaggcggcgctgcggcaggaggtggcggtggcggcgggcatgctccgcctctactttcacgactgcttcccgcagggctgcgacgcctc

SEQ ID NO: 10895 - DNA, 234 bp, Triticum aestivum
  Clone ID: uC-tsrow189120b03b1
tgcactccattggcgtctgcaacggcgtgatcgggaacaacctgccggcaccgagcgacgtcgtgaagctctacccaaaccaagggcatcgaccccatgcggatctacgcgacggagagcaacgtcctcaaggcgctcagcggcacgggcatcagcctcctcatggacgtcggcaacggcgcgctgaccagcctcgccaacgacccctccgccgcgcccgcctgggtcaaggcc

SEQ ID NO: 10896 - DNA, 332 bp, Triticum aestivum
  Clone ID: uC-tsrow189120b05b1
tccatctatccctgagaagaacatcagttgtttgacccgcctagaccacaacagggcactcggtcagatttctgagagacttggtgtccaagtttctgacgtgaagaatgctattatctggggtaatcactcgtccagtcagtaccctgatgttaaccacgccactgtgaagacttccagtggagagaagcctgttcgtgaacttgttcaagatgatgaatggctaaacggggagttcattgccactgtccagcagcgtggtgctgcaatcatcaaagcgaggaagctctccagtgctctctctgctgccagctcagcttgtgatcacatcc

SEQ ID NO: 10897 - DNA, 191 bp, Triticum aestivum
  Clone ID: uC-tsrow189120b06b1
ccatcctggcgtcggagacgatggagatcccggaggaggtgaccgtgaaggtgtccgcgaagatgatctcggtgacggggccgcggggcacgctgacccgcaacttcaagcacctcaacctcgacttccagctgcaagagggcgggcgcaagctcaaggtggacgcctggttcggcacccgcaagaccatg

SEQ ID NO: 10898 - DNA, 361 bp, Triticum aestivum
  Clone ID: uC-tsrow189120b07b1
ggtaggttgaggcgaccaaggaggaggcgccgggcgccgtttagacggaggatgccttggttaccgagccagcagctgcggccgagccggaggccgaggcgcccaaagagccagaggcgccagccgtggtcgagacagagaccaaggaggccgtggcagaggccgagccggcggtggtcgaggaggtgaaggaggaggccgcgcctgctgccgagccagaagcaccggccgtcgccgaggaagcaccggctgcagcggaggaggcccccgcggccgtggcagaggagccggccgccgcggtggccagcgtcagcgtgtgaggcgcgcacagagacagaggaggggctggctgggtcagcgt

SEQ ID NO: 10899 - DNA, 299 bp, Triticum aestivum
  Clone ID: uC-tsrow189120b08b1
ccattcttcgagatgggtcgcgtgatccgcgctgggcgaaagtgagcgggctttgtcttcaagtcccacacccaccaccggaagggccccgcccggttcaggtcgctcgacttcggcgagcgcaacgggtacctcaagggcgtcgtcaccgatgtcatccacgacccggggcgcggtgcgccgctggccaaggtgaccttccgccacccgttcaggtacaagcaccagaaggagctcttcgtcgccgccgagggtatgtacaccggccagttcgtctactgcggacgccgagccaccct

SEQ ID NO: 10900 - DNA, 306 bp, Triticum aestivum
  Clone ID: uC-tsrow189120b09b1
gatagctcggcgtcccgaccaccatccacagccggggtggttcggcatcgctgcctgatctggtcaccgcactgtcccttccacccgccaaactgccttacctccgtcgcatcatgcggctgctggccacgtccggcgtcttcgccgccgacaacgccgccgacgtggtcacctactaccgcctgacccccctgtcctggctcctccttgacggcgtcgccgtagatggccacccaagccaaacctccattgtgcttgccgcaacctcgaggcactgccttgaggctgccatggggctctccgact

SEQ ID NO: 10901 - DNA, 402 bp, Triticum aestivum
  unsure (1)..(402): unsure at all n locations
  Clone ID: uC-tsrow189120b10b1
gaaagactaatcgaaccatctgggagcttttataccgccgttgcttttcttacgacagcagngttgnattcagttttatgaggtaaagcgaaagatctaattgacaaatttttgacagaagaccctcatcaacgtctaggatcagatggtgcctctgaggtcaaacaacatccattctttaaggacgttagctgggataccattgctagacagaaggctgccttcgttccttcctcagatagtgcatgtgataccagctacttcaccagccgttactcttggaatccatcagatgaaaacatatacgaagcctatgaatttgaggattccagtgagaatggaagccttagtggcagcagtagttgtgtgagcaatcaccaagatgacatgggggatgagcat

SEQ ID NO: 10902 - DNA, 433 bp, Triticum aestivum
  Clone ID: uC-tsrow189120b11b1
gggctgcactactcacggtaagaacggcaactttcacaagtgagtgaccttcttaccaaggaaagaccaggagagatggcaatgaggccgcttgtcgtcctggccctggccgtggcgctcgccggcgtggcactgggagggggcgcggcggagggggccggcgagtgcgggaggtcctcccccgaccggatggccctgcgcatggccccgtgcatctcggcggcggacgagccggactcggcgccgtcgagcagctgctgctcggcggtgcacaccatcggcaagagccccagctgcctgtgcgccgtcatgctgtccggcaccgccaagatggccgggatcaagcccgaggtcgccatcaccatccccaagcgctgcaacatggccgaccgccccgtcggctacaagtgcggagattacacgctgccttgat

SEQ ID NO: 10903 - DNA, 333 bp, Triticum aestivum
  Clone ID: uC-tsrow189120c01b1
gttgccgcagaacttctcagagttatgcagcctaggagacttctcctattaaacggaaatttgttccatgtgcgctcttgtgcacatattctgaatctcacagttgaagaaagcttggaacagacatctgacataattaatagagtccgtgagatgattcagaatgtcaagttctcacaagaaaggcttcaaaagtttctagataccgcaaagctgctgcagattgaccaaaaactgaagctaattacgctgctttcttgaccgctaaggagtgggctgatgtgaaagccctcactgaaatacttgacgcgctcaataatacaatggagaagt

SEQ ID NO: 10904 - DNA, 298 bp, Triticum aestivum
  unsure (1)..(298): unsure at all n locations
  Clone ID: uC-tsrow189120c04b1
ccaggtcgaggnggcgttccaggccgtggagaactggatcgcggaccgggccgtgctccccgtggagaactcgctcggtggcagcatccaccgcaactacgacctcctgctccggcaccgcctgcatatcgtgggcgaggtgcagctccccgtgcaccactgcctcctggcgctcccgggcgtgcgcaaggaggacatcacccgcgtcatcagccacccacaggcgctggcgcagtgcgagcacacgctcactcgcatggccggcctcaacgctgcccgcgaggccttcgacgacacg

SEQ ID NO: 10905 - DNA, 371 bp, Triticum aestivum
  Clone ID: uC-tsrow189120c05b1
gatacgaggtacggtgcagcaacgcatttctgagtttgctaaaaaagagaccttaccttcttttacaaggtctggttgtgcctatttgatggaggcatgccagtttgagcaccagctttttgctcacttcttcccagcatccgcaccagatgtttcaactatggctcctttaatggatccattgtgcacacacttatatgatactctgaggcctagactgatatatgaaggcaacattgattctctctgtgaactcgttgacattctgaaggtcgaagtgttgggagaacaactgagtagacgtggtaaatcagcagctggactccgtccaatattgcagaggatacttgcagatgttcttgagcgtctgg

SEQ ID NO: 10906 - DNA, 345 bp, Triticum aestivum
  Clone ID: uC-tsrow189120c06b1
aaccagaagacaggggcgtactccaagcgtttccaagtcaagttcaagagaaggcgccagggcaagactgactacagggccaggctgaggctcacaaaccaggacaagaacaagtacaacactcctaagtaccgttttgttgtgcgatttaccaacaaggatgtcactgcacaaattgtttatgctaccattgctggtgatattgtgatggccgctggctactcccatgagttgcctcgctatggtcttgaagttggcctcaccaactatgctgcagcttactgcactggtctgcttttggctcgtcgtgtgcttaagaaccgtgatcttgatgaggagtatgaa

SEQ ID NO: 10907 - DNA, 389 bp, Triticum aestivum
  unsure (1)..(389): unsure at all n locations
  Clone ID: uC-tsrow189120c07b1
gaatanttatataaagtctcggtaactccaggagggagtgtttaaatccgtcagttatttgattatagctcctctgaagtcaatttttcttcttcagatttctgggttttagttgcttctttgaaggaatttattgcaaatgagggcaatggtgagctacctctcgagggaacaataccggatatgacatcacttactgagtattatgtaagcttacaaaagatttaccaagctaaggctgaatctgattgtcttgccatagagcatcgtgtgaagagtattttgaagcgaattggcagagaccctgattctatttcaagggcatgtatcaaaacgttctgcaaaaacactagaaaactcaaagtctgtagataccgcagtatggagga

SEQ ID NO: 10908 - DNA, 336 bp, Triticum aestivum
  Clone ID: uC-tsrow189120c09b1
cgattgtttccgcccacgcgtccgcccacgcgtcgggccatttgatcgagcactggagtgtggtaaaggctgaacagaagaagaaggattatgagaagaccaaagccacctttgataacaaggagagtgcgagctccaagaaggccaagactcagaacgatgaggaggtcaaatctgaggtcgaagatgagggtagcgatgaggaaaatgaggacgatgacgagtaaatagtgtatcagatcatgaggtagcaaattgggtgttgggtccccgcttagtgtactagtttgctatcctgctatcctcagtgctagatgatgagatttggtagtagat

SEQ ID NO: 10909 - DNA, 351 bp, Triticum aestivum
  Clone ID: uC-tsrow189120c10b1
gatctcgatccacatcgggcaggggggcttttaaatcggcattgcgttcttttaactttactgcctcgagcacggcatccagcctgatggccagacgaacggcgacaagaccatcggaggtggtgatgacgccttcaacaccttcttcagcgagaccggagccggcaagtacgtgccccgtgcggtcttcgtcgatcttgagcccaccgtgattgacgaggtccgcaccagcgcctaccgccagctcttccaccccgagcagctcatcagcggcaaggaggacgccgccaacaacttcgcccgtggtcactacacaattggcaaggagattgtggatctctgcctcgaccg

SEQ ID NO: 10910 - DNA, 364 bp, Triticum aestivum
  Clone ID: uC-tsrow189120c11b1
aacttagcttaccatcttgacttcaatcagttctgccccttttcttcccggtcaatcatgccttgcgacggcgatgacaaggagtcgaaaggccgcctgaacgcggtcaacatcgccgcccgcgtcgccgccatggggctcgccgtggcgtcggcggctctcatggtcacggccagccagtgcaccgtcgtcctcccgaacggcgccgaggcacacaccgtcacttacagcgacttcggcccgtttgtgtacctggtggtggcgaacgccattgcggcggtcatggtgggggtggccatcttcctgagcgtgtggaagaagggcagcggcaagtgctccagggtgctcgtgccgctcctcgacg

SEQ ID NO: 10911 - DNA, 260 bp, Triticum aestivum
  Clone ID: uC-tsrow189120c12b1
cagggaagatccagcagcgccggcgcctccacccgcccacccaaccaccatgacgggcgagaccgcgacgcaggcggagctgctacgcgccgtcctggaagagcagaagctcgcggcgcaaggagatgagcctgtagttgaggatgatgatgatgaggaagatgaggatgatgatgaccaggatgacaaagacgatgacgtggaaggagctgatgcaagtggaagatctaagcagagtacgagtgagaagaagagcaaga

SEQ ID NO: 10912 - DNA, 287 bp, Triticum aestivum
  Clone ID: uC-tsrow189120d02b1
ctccctatgtgaagccacatatggacaatgagctcttatttatcatctgccaagctggttcacaatcatttatctataaaacaaggctcatggatctgagtccagatctgagttcaatgttaggaatagcgactcctctcaagccacattacattgtacatggagatgatcgtggtccgaggcatttttttctccttgactcaaaactacatgctgtctcattcctaaaagatggcatggatgtgcttaacctggacaccagatgtgagcatttagatttgcaagca

SEQ ID NO: 10913 - DNA, 223 bp, Triticum aestivum
  Clone ID: uC-tsrow189120d03b1
gccgccccccgggtccccgggatctcggctcgcaggcgaccatgtatcgcgccgctgggagccattttcgctctctcaagaatcatggtgctagtagatttgctagcacaagtgtagtgaagcagtcttcaggtggtctgtttagctggcttcttggcggaggctcaagccaactaccccctcttgatgttccgctcccaggcattaccattcctccacccct

SEQ ID NO: 10914 - DNA, 339 bp, Triticum aestivum
  Clone ID: uC-tsrow189120d06b1
ccgaaacccagcagcgaccgccggcgcatctaaccccgggccgaggccggcgaactccgaagggaagcggagatgcagcagggcgaaggcacggaggcgcaggcgacgcgggatgaccagcagaacaccaaccggtacggccgcctcaacaaccgcctacacgagctcgccgacgagatcaggctcgccaaggaagcaaaggaaaacctcgaggacgcggggaatgaactcatcttgcctgatgaagacggggagcgactccaaatcggggaagtgaatgcccacatgccagaggacgatgtggaagctaggctagagcagatgaaagaggacgcagct

SEQ ID NO: 10915 - DNA, 311 bp, Triticum aestivum
  Clone ID: uC-tsrow189120d10b1
gcaagatcatggacaagctgcctggttaccacaagacaggggaggaggacaaggccgccgccgctacaggcgagcacaagcccagcgcttgatcgccgccgtgcccgagacccgtgaccggacctcgattgaattgttggcgtgtgttgtgtttgctttacgtctaagttggtgtcaaggtgggaggggttgatcgtctttgaaggtccggtccgtgaagcccgttgagtgacgggtgcttctgtttcagtctttgaaggtcctggatattggtaagctttgttacttatgggcacttgtgtattggttta

SEQ ID NO: 10916 - DNA, 280 bp, Triticum aestivum
  Clone ID: uC-tsrow189120d11b1
cgacaacacagctgggggtcagttatacttgaacaaagagtcactgggcgcttccattacttcggctaaatccagtgaaatgaatgtattggttcctagcgacgagactgatggcgactgggtggagcatccattgccgcagcagtacatccatcttttcgaggacgggcagttcaccacatccccagtttctcattccggcgcataaataaatccgatgatatcttccttttttgtgtgtgtgtgtggctgtttgtttgttcgatgctgcctttgcatt

SEQ ID NO: 10917 - DNA, 353 bp, Triticum aestivum
  Clone ID: uC-tsrow189120e02b1
ttctgacttctctggcattcatatttctggctggaatatttgtttcttcgtggttgggttcaactgtcttctgggttggagaatggtttataaagaaaatgccatttgtgaagcacatatattcggcatcaaagcaagtcagcactgccatttcaccagatcaaaatacgacagcatttaaagaagttgcaataattcggcatccacgtgttggtgaatacgcattcggatttataacatcaactgttgtccttcagacagacaaaggtgatgaggaattgtgtagtgtttatgtgccaacaaatcatctatatattggtgatatatttctgctgaactctgaagagatcatc

SEQ ID NO: 10918 - DNA, 364 bp, Triticum aestivum
  Clone ID: uC-tsrow189120e04b1
tgatctgatgcccttctcggcggcgatgccggccggaagaggctaaggagaggcgccggatataggtctgtacatagtagttccaataaaagtagtttagtgatgtgtttcaggagtagtagtgcctccgtggcgactggcgtgatgtcgtcaggaagcgtgccgccggcgtcttcgagcaacgctcggtggcttcaggttgctgccctgctgtttctgctgttctggggagagctagcacatggcggtggcagagctgacgcttccccaaataagctcggtgagttccctgacccggcggaggaccctctcgtcgttcttgtctctggcggccaccacggtggtggaagcagggagaaggcga

SEQ ID NO: 10919 - DNA, 315 bp, Triticum aestivum
  Clone ID: uC-tsrow189120e05b1
aatccgttaccaccaaggcggaagatttagtactcctcctcgtctacttcttgctcagctccacccacaccgaatctagcatcgcggcggcttcgtgttgactcgtctgtcctcctccccggctcgggagcgctcgtgggcttctcggatcggcggcgcgtccgctttccgtgctcggatccaagaaaccagctgggagttaggttcttggatttggatctcccacccgcaatggcggcgctcgtggagctcttcacgagatcctactcgtcctccacgccggtggactgggaagcggaggcctacccggcgtac

SEQ ID NO: 10920 - DNA, 389 bp, Triticum aestivum
  Clone ID: uC-tsrow189120e06b1
cccgaaacccagcagcgaccgccggcgcatctcaccccgggccgaggccggcgaactccgaagggaatcggagatgcagcagggcgatggcacggaggcgcaggtgacgtgggatgaccagcagaacatcaaccggttcggccgcctcaacaaccgcctccacgagctcgccgacgagatcaggctcgccaaggaagcaaatgaaaacctcgaggatgctgggaatgaactcatcttgtctgatgaagatgtggtgcgattccaaatcggggaagtgtttgcccacatgccagtggacgatgtggaagctaggctagagcagatgaaagaggacgcagctaagaagctggagaagctggaggaagagaaggaatccatccttgcccaga

SEQ ID NO: 10921 - DNA, 279 bp, Triticum aestivum
  unsure (1)..(279): unsure at all n locations
  Clone ID: uC-tsrow189120e07b1
cgactagttcaacccagtaaactactgccacccgtgcgccggttaaatggcccacgcccttattctcctcctggcgctcgccgccctggccacggccaccgtcgccgtcgcctcctcctcctcctcctcctccttcgccgtctccaacccgatccggcccgtcaccgagcgcgccgcttcgacgctcgagtccaccgtcctcgccgcgctcggccgcacccgccacgccctccgcttcgcgcgcttcgccgtcaggtacggcaagagctacnagagcgc

SEQ ID NO: 10922 - DNA, 310 bp, Triticum aestivum
  Clone ID: uC-tsrow189120e09b1
gatgacgaagaaggagctgggcgagacccacgacgtcctccgcttcggcgtcaacgacagcgtccgcggcgacctcgcgccggcgcaccccgtccaggccaccatccacaaggagaacaagttctgggaggagaagaagaagttcgggaccgaggccatctacggatccgccttcaacatccgcagggatctcgacgcccagatcctctccaggttccaaaggcccccaggtgcattggcatcatctatgctaggatatgaggcgatgacaggttccttggatgattttggatttgaagattaccttaac

SEQ ID NO: 10923 - DNA, 319 bp, Triticum aestivum
  unsure (1)..(319): unsure at all n locations
  Clone ID: uC-tsrow189120e10b1
aaattcttctggggccttggcttcggcgtgccgggcgngattatgctgctcgcgctcctcgttttcctgctcggcaccaggacgtaccggttctacgactccggtggcggcgagggcgacagcgcgttctcgcgcgtcggcaaggccatgaaggcatggcgcaagaggtcgccagagggtgactgcgcagaggacgccgtgctcatggaggaggtgcggggcctggcgaggctgttcccgatatgggcgacgtgtctgctctacggcgtggtgttcgcgcagccgccgacgctgntcacgaagcaggcggcgacgctcg

SEQ ID NO: 10924 - DNA, 382 bp, Triticum aestivum
  Clone ID: uC-tsrow189120e11b1
gactagttagccagtgtctgatacaggccgccggggacatttgcagcttcacgccattcagtcagccaccggagcttgcgctcagaccgattgccgaccggagccatggaggaggactacgtgttcaaggtggtggtgatcggcgactcgggggtggggaagacgcagctgctggggcgcttcacgcggggcgacttctgcctcgactccaagtccaccatcggcatcgagttccagacgcgcaccgtcgacatcgccggccgccgcgtcaaggcccagatatgggacaccgccggccaggagcgctaccgggccgtcaccagcgcctactaccggggcgcgctgggcgccatgctcgtctacgacgtcacgcgccgggaca

SEQ ID NO: 10925 - DNA, 458 bp, Triticum aestivum
  Clone ID: uC-tsrow189120e12b1
cactgtttccgtgggaaactgggtcgcaactcggagaaattgactgaatacttcgaggcgattcctggagtgcctaaaatcaaagataagtacaaccctgcaacgtggatgcttgaggtcagttcagttgctgcagaagtacgcctgagtatggattttgctgactactacaggacttcagatctgtacaagcaaaacagggtattggtgagccagctaagtcgaccagaaccaggaacatcagatctgtattttcctacagaatactcgcaatccattatagggcagttcaaagcctgcctctggaagcattggctgacctattggcgcagcccagattacaaccttgtcagattttccttcactttgttcacagccttgctgctgggctccatcttttggaagattggcaccaatatgggggatgccaatactcttagaatggtcattggagcaat

SEQ ID NO: 10926 - DNA, 170 bp, Triticum aestivum
  Clone ID: uC-tsrow189120f01b1
atcttcaggtgctgatgctcagctatgcgtctggagcattgatggttgggagaagaagaaatcaaaatatatccaacccccggcaaatcgctctggtgctttagttggcgatacaagggtccagtttcacaatgaccaaacacatcttcttgtagttcatgagagccaac

SEQ ID NO: 10927 - DNA, 339 bp, Triticum aestivum
  Clone ID: uC-tsrow189120f04b1
accatctgttcctctcgctaccttccatcttccttagcgacgaggccacccagagctccacaggaaagaagcgcgaccggagaaagaaggagagcaagatgtcgtcggtgttcagcggcgatgagacggcgcccttcttcggcttcctcggcgccgccgccgccctcgtcttctcatgcatggggggcggcctacgggacggccaagagcggcgtcggggtggcgtccatgggagtcatgcggccggagcttgtcatgaagtccatcgtgcccgtcgtcatggcgggagtgctcggaatctacggcctcatcatcgccgtcatcatcagcaccgggatc

SEQ ID NO: 10928 - DNA, 403 bp, Triticum aestivum
  Clone ID: uC-tsrow189120f06b1
gagctcacggcgacgttcaggtccaggtcagagctgttatttataggaaggagggccggccatgtcttcctcctctccccccaatagcaacgacagcggcaagaagaacccgctggacgccatgggcgccttcttctcggcgcaggtgaaccgccgcaagctggtctccacgcagaagctggccatgtccgagcgctgcacctcctgcggcgacgagttcccgggctgcgcccaccgccccgccgaccgcaagacgtggatggcggagctcggccccgaccgcctgcgcgtgcaccaggtggtgtggccgggcacccacgactcggccaccaacaagatcggcatccccttcatcacccgccccttcgcgcagtgccagtcgctctccgtctaccaccagctc

SEQ ID NO: 10929 - DNA, 342 bp, Triticum aestivum
  Clone ID: uC-tsrow189120f07b1
catggcatcctccaagagcagccgggcaatgtttgcactggtcatagtcatggtcgcggcggccggcgtctcggcgcagaacaccccgcaggacttcgtcaacctgcacaaccgcgcccgcgcggcggacggcgtcggccctgtgacgtgggacaacagcgtggccaggttcgcgcaggactacgcgaacaagcgcgccgccgactgccggctgcagcactccggcgggccgttcggcgagaacatcttctgggggtccgggcagtcgtggacggccgcgaacgccgtgaagtcgtgggtggacgagaagcggaactaccacctcaacagcaacacctgcga

SEQ ID NO: 10930 - DNA, 354 bp, Triticum aestivum
  unsure (1)..(354): unsure at all n locations
  Clone ID: uC-tsrow189120f08b1
ccgaatattgccccttggtgatgagaattccattaagtcgaaggaatccctatgggccttgtatgaatgctggtgcaagtattggggggtatcccgtgaccgtgaagagatggtccgccggttcaagtcatttgaggctactgcacagtgggtttacaaaatgaacaactctgggtgttcgcaagtgtctcaactgggcccgcatgcagatttttcagagagtgagtttgctgaggtggtgtttcctccacttcctgatgatgatgatgaagacataaaagagatggtgccaggtcaagatttgggccaggagcttgaggagcccttanataattaattcgagaaattatgaac

SEQ ID NO: 10931 - DNA, 346 bp, Triticum aestivum
  Clone ID: uC-tsrow189120f09b1
cgctgcgttcggcacagcaaagccggcttcccgggggctttttatactcacattcagtgttttattatcagcgaaggtcatacaaaatgcattcttggcacaagatggtccacggactaggcacaatccaagatatacctgtgacttttgtgccctcaatacccgcagcatgcattccgtccaggggtgtagattatcattagctgatacttcagccaagtggttaaataccacatcaacagcatggattagctttgggaaacaaggaaatattagctgcaatgctactcaaggtgccagtgatgtcttgtccattgacaaagttgattttctcaagctacaaaat

SEQ ID NO: 10932 - DNA, 316 bp, Triticum aestivum
  Clone ID: uC-tsrow189120f10b1
ccctgccctcgcagccgcagcggcgcgcacccctgggcctctttactgaagacagcgccgttttcggccagagcacaggatggcgaccgtccccgctcccgcagccgagaccgcggcctccaccgcgcgcacggtgaaggatgtcaacccccacgagttcgtcaaggcctactccgcgcacctcaagcgctccggcaagatggagcttccagagtgggttgacattgtcaagactgcaaggttcaaggagctgccaccttctgatgctgactggtactacatcagggctgcctcgatggcaaggaagatctacctg

SEQ ID NO: 10933 - DNA, 413 bp, Triticum aestivum
  unsure (1)..(413): unsure at all n locations
  Clone ID: uC-tsrow189120f11b1
gatgccttgctccgtcgccatcctcgtcgaccgggggctttttggccactcccaggttgcttccaagaacgtggagttctccgtggccatgctcttcttcggcggggcggacgaccgcgaggcgctggcgtacgcgacgcgcatgtcggagcacccgggcgtcgccgtgaccgtgacacgcttccggcccagccgtccatcatcggacgacgcagctgacgaggtggccatcgaggtgttcaagggcaaggtcgaggccgtgaaggacgggtcggcgatgtacgaggacgtagaggcgtcggtcaaggaggacgtgctccaggccatcaactcgctgtccaagtccaacatgttcgtggtggggaggatgccgncgacggagccgctggtggagaggccccaggagctgggcc

SEQ ID NO: 10934 - DNA, 338 bp, Triticum aestivum
  Clone ID: uC-tsrow189120f12b1
agattacttcccacaccacagccccagagccacggcgcctttctgctcgcttctctttctcttcccctctccctcccttcgcgatctctcttcccccggcgctagcttttcgccatcgccgcacgaatcctcctcgcctcgacttcagctcaagggttcgacggagggccaccggccggagctacctgcgtagagatttcgtttcacctggatttcttggctagaagatccatgcagtgattagtgtgtcagattcttcaccgaacaaggatggccgacactccaacttcccggatgatccaccccttcagcaacatgcagaggcagaacccgaagca

SEQ ID NO: 10935 - DNA, 125 bp, Triticum aestivum
  Clone ID: uC-tsrow189120g01b1
agtgttggtgtcaggtccatattctgtattttggaaaaagccgacgccaaatggtggaataagcttgttcgagatgatcagaaggcaccacacttcgtgaaagttgattgggacaaatgggtcga

SEQ ID NO: 10936 - DNA, 428 bp, Triticum aestivum
  unsure (1)..(428): unsure at all n locations
  Clone ID: uC-tsrow189120g02b1
caatccctcacgcgcgtccggggcgccgtttgcccgccgggacgatggtcgcgtcggggtccgggtccgggtccggccagatccagccgctcaagatcccggacgccgtcgtcgcgctcgcgcaggccgccgccaaggccaacaacagcagcaacaccgccgccgccgacgccaccgacaaatatctccccgggtggccgctcttctcgccgcccaagatgcagctgaccaagtgcgccaagtgcccccgggagttctgctcctccgtcgccctccgccgccacacccgcgtncaccgncgcgccctcaagatcgacaaggatttccccaagaacagagaccaccttgctgcattctgggacaagctcacggtggaccaggcccaagcgatactgtccttggagggcgtggctatagaggagaccagc

SEQ ID NO: 10937 - DNA, 395 bp, Triticum aestivum
  Clone ID: uC-tsrow189120g03b1
accgagacctttgcgcaggtgacctgcctcgcggagcccgccgacccgagcgatcccctcctccgcgagtgggtcaagcaccccgccaaccccgtcgtgtttccgccccccggcatcggcatgaaggacttccgcgaccccaccaccgcgtggttcgacgagtccgacggcacgtggcgcaccatcatcggctccaagaacgactcggaccactccggcatcgtcttctcctacaagaccaaggacttcctcagctacgagctgatgccggggtacatgtaccgcggccccaagggcaccggcgagtacgagtgcatcgacctctacgccgtcggcgggggccgcaaggccagcgacatgtacaactcgacggccgaggacgtgctgtacgtgct

SEQ ID NO: 10938 - DNA, 358 bp, Triticum aestivum
  Clone ID: uC-tsrow189120g05b1
ccaacaaccccgtcgttgccggggacgccggcacctactactccggcacctcatcgtccccgattcgtcccgtggccggggaccagtcgtcggcgcaggaggacggatgggtcatctgcagggtgttcaagaagaagaacatcctcgtgaaccaaggccagaacggcggcggcggagcggcgtccagcaagctggccggcgccgcccccatggagcgcagccagagcaactgctcgtccacggtgaccaccatcagcaaccacatcaaggcggcgcagcagcaggaccagcagcaccagctgctgcactactccgccagcgacgacgcgctcgaccacatcctcaaccactacatgca

SEQ ID NO: 10939 - DNA, 405 bp, Triticum aestivum
  Clone ID: uC-tsrow189120g07b1
aactagcttgcggacgcgtgggcgacggcgacgggggcctttttagccatcgtgcgcgcttcttcctcccgctactacgttgaagcggccatggggatggcggactggttcaggaaggactttgatggacctgtgccatcgccgctcgaggacgtgcatggcgcggccatcttcgaggagagcatgacgctcctggacccggagatggatcagctgatccacgacgccggcgctgctcacgaccacatggggatcggccccgtgctccggcagtgccgtgagctcttcgaggggctcgagtctctcactgactgcggcggcggtgatgggacgacggccaggtccatagtcgaggcctacccgcacatgaagtgcactgtgctggaccttccaaaggtcatggac

SEQ ID NO: 10940 - DNA, 315 bp, Triticum aestivum
  unsure (1)..(315): unsure at all n locations
  Clone ID: uC-tsrow189120g08b1
nactagtttgggctggtggcggacctgatctcaggtggaattatagcagtagcgctcttcgtatctcccggcgccgcgcgttgaaattcatggttgttcttcgagctccggctcttgaagcattctgatttggaaatcgcttcttcctggagtcataagaatcagctattccgcaaagattgcgctttttctcttctgttggattcttccattagagcggcggcctctccggagatgacgaccggggccgtcacggagagcttcccggagagcagcgagccgctgctcccgacgaagcggcgatgggagggggag

SEQ ID NO: 10941 - DNA, 269 bp, Triticum aestivum
  unsure (1)..(269): unsure at all n locations
  Clone ID: uC-tsrow189120g09b1
atcaaccaatttttttcccttnccttatattatatattatgaacatgacaagaattgccaaaaactcaacaatgcctgataggccaataaaaaaaggttaatggcctcacacaccagctgctgagatcacaactcgccacactgacacaatcaattggacttattgtcactcactcctgtacttgagaaaactctcgcaacccctcatgacaaacactgaaagaaagccaagaaaaaaaatacacaatcattttaggaatctctacttc

SEQ ID NO: 10942 - DNA, 451 bp, Triticum aestivum
  Clone ID: uC-tsrow189120g10b1
ccatacttcgcccaaatcgccgccgcaccggctgcggccgtttccctgcccccgcgcgcgccatgacggcgaatcagccggcgggcgaggccctcgcgacccacatctccggcatgtcccgccccgagatgtacgacctcatgtcccagatgaaggccatgctcgaccacgaccaggagagggtgcgccgaatgctcgtcgagaaccccgacgtcacccgcgcgctcttccgggcccaagtggttctcggaatggtcaaaacacctaaagctgcacaatcttccgacacgccccagccagcagctgctcagacaactcctcctgcatcagttaaagctacagtacaagatcatgttaacttgccccagcctcccttgcctaccaatcaacagaatttgcaaccttctggccaatttccattgggcgcttctaatgtgacatcatctttgga

SEQ ID NO: 10943 - DNA, 397 bp, Triticum aestivum
  unsure (1)..(397): unsure at all n locations
  Clone ID: uC-tsrow189120g11b1
gaataaatccccatctcctgagcccctttgtgccggcgccattaggcgcttggatgggtcggtgttctccgtctccgtggccggcaagcgcaagcgttcgccggagtacccctgcgtgtcgcgcttccggcagcggcgactcctctccttcctccggcgccagaagctgttcgacgcctacgacgtgcttaccggcgagtcgggtgcgcgcatcgacctgtaccatctgaccgaccttgtcaaggcgggccggtgggacgaggccatcgaccatctctcctgcttcctgccgtgcgaccttgctctgggcgcccacggncgcgtcctcctccacttcctccgcgtgcacaaggccgtccacgacatcgtctccggggcgcccgagagccgtgccgtc

SEQ ID NO: 10944 - DNA, 118 bp, Triticum aestivum
  Clone ID: uC-tsrow189120g12b1
gcgctgaccaggcgccaatccgcctcgggccaggacttcccggggtcggggcaccggccggacgaccgcaagacgtggatggcggagctggggccggagcgggtgcgcgtgcaccagg

SEQ ID NO: 10945 - DNA, 344 bp, Triticum aestivum
  Clone ID: uC-tsrow189120h02b1
agcacctcatcaatttgccatgcccagtgttccatacatggaatccagaacttcgcaggacttggttaggggtgagcctgaaaggtcaactcctggggatatattccctggcttcaatgtctctcctggtgtcctggctgagccatcatttcctgcaccacttcaaccccaactgggcatggtgtctcatgctggaaaatcaacaaatccgtttgacatggcatttgagtctgatgttgaagccatcgacatgtttatggatttgacctcactacaagcaacattgccggatactcatcttcccgcagaatactccatcaacttagcagagccatggatgtctc

SEQ ID NO: 10946 - DNA, 307 bp, Triticum aestivum
  Clone ID: uC-tsrow189120h03b1
ccggccgccgcccccaaggccaagaccccagccctcaacgagcggatcctgtcctcgatctcgcgccggtcggtggccgcgcacccgtggcacgacctggagatcggcccggacgctcccacaaccttcaactgcgtgatcgagatccccaaggggagcaaggtcaagtacgagctggacaagaagacggggctcatcaaggtggaccgggtgctctactcctccgtcgtctacccgcacaactacggcttcatcccgcgcaccctctgcgacgactccgaccccatcgacgtcctcgtcatcatgc

SEQ ID NO: 10947 - DNA, 357 bp, Triticum aestivum
  Clone ID: uC-tsrow189120h04b1
ggctgtttatggtttgacggaggttcttcgagatgaaataagaaatgcacggcttgttgccaacccgggatgttatcccacgtctattcagctccctcttgttcctctaataaaggcaaaactgatcaagctgagcaatataataattgatgcaaaatctggggttaccggggcaggacgtggagctaaggaagcaaatctttacaccgagatagctgaaggcattcatgcttatggaataaaaggccaccgtcatgttcctgaggttgaacaaggattgtcagaggctgcagaatccaaagttactatcagcttcactccaaatcttatctgcatgaaacgtgggatgcaatctac

SEQ ID NO: 10948 - DNA, 479 bp, Triticum aestivum
  Clone ID: uC-tsrow189120h06b1
taaacgaagttatgaagtattatgcacagttttaccatggggtgggtaaagatggaagacctgtctatgtggagttaataggaaaagttgatgccaacaaggtgctgcaagtaacaactatagaccgatatgtgaaatatcatgtcaaggagtttgagaaatgtttccagatgagatttccagcttgctcaattgctgcaaaacggcacctggactcatgcacaactattctggatgtgcaaggcgtgggattgaagaacttctcgaaatgtgcaagggaactaatcacccgactgcagaagattgacagtgacaactacccagagacattatgccggatgtacataattaatgctggccaaggcttcaagatgttatggggcacaataaagtcttttcttgatccgaaaactgcttcaaagattcatgttcttggaaccaagtaccaaaataagctacttgaaataattgatgagagt

SEQ ID NO: 10949 - DNA, 359 bp, Triticum aestivum
  unsure (1)..(359): unsure at all n locations
  Clone ID: uC-tsrow189120h07b1
cccagggtttccgccgccaaatcaccggcgagatgttggaggagctgctcatcttcacgcgcggcggcctcatcctgtggtcgctggccggcgccgccgctgcgctgaagggctccccgatcgacgcanctcatccggccttcctcctcgagggccgctcagcctccgccggggccggcgccggcttcacccacggnccgcacgcgctcaggtggacctacgacaacgcgctcgggctcgtcttcgtcgccgtctacaggcgggtgctccacctgctgtacgtcgacgacctcctggccgccgtcagcgcggaattcgcgcggatctacaacccgagccgcgtgtnctacgacgagttc

SEQ ID NO: 10950 - DNA, 280 bp, Triticum aestivum
  Clone ID: uC-tsrow189120h10b1
agattctattccaaatctcttcttcccctccttggaggcctttttgagttcacatgtttggatgatgtcttgcagctgtggatcaggttgcagctgtggctcagactgcaagtgcgggatgatgtaccctgatctggaagagcagggcagtaccaccgcccaggtcgccgccgtggtcgtcctcggtgtggcgcctgagaacaaggccgggctgttcgagatgaccgccggcgagtccggtgagggctgcagctgtggcgccaactgcaactgcaacccc

SEQ ID NO: 10951 - DNA, 335 bp, Triticum aestivum
  Clone ID: uC-tsrow189120h11b1
tcggcgtgttcggcctcatccgcctcctttccctgctcttggcggcggtctacaggcgcgtcgtcatgctcggatgggtctgcgttggcttctcggtcagcgtcttcgtcgcacccctcagcgtcatccgtcttgtggtgcgcacccggagcgtggagttcatgcccttctccctttccctctccctcaccgccagtgccgtcgtctggttcctctacggcctcctcatcaaggacaaatatgtcgcccttcccaacattcttgggttcgcctttggggtgatccagatggggctctatgccctctaccgcaacgccacgcccagaccagccccc

SEQ ID NO: 10952 - DNA, 219 bp, Triticum aestivum
  unsure (1)..(219): unsure at all n locations
  Clone ID: uC-tsrow189120h12b1
cccgaaaggagntcttttatatggaccacctgggacgggaaagacgttgatggctcgtgcatgtgctgcacaaaccaatgcaacctttctgaaacttgctggtccgcagctagtccagatgttcatcggtgatggggcaaagcttgtccgagatgcctttgagttggcaaaggagaaggccccctgcatcatttttattgatgagattgatgcaattgg
